(19) United States
(12) Patent Application Publication
(10) Pub. No.: US 2022/0403038 A1
(43) Pub. Date: Dec. 22, 2022

(54) METHOD OF TREATING OR AMELIORATING CUSHING'S SYNDROME USING BINDING PROTEINS FOR GASTRIC INHIBITORY PEPTIDE RECEPTOR (GIPR)

(71) Applicant: AMGEN INC., Thousand Oaks, CA (US)

(72) Inventors: David John LLOYD, Thousand Oaks, CA (US); Elizabeth Ann KILLION, Van Nuys, CA (US); Glenn N. SIVITS, JR., Newbury Park, CA (US)

(21) Appl. No.: 17/775,257

(22) PCT Filed: Nov. 9, 2020
(86) PCT No.: PCT/US2020/059647

§ 371 Date: May 6, 2022

Related U.S. Application Data
(60) Provisional application No. 62/932,381, filed on Nov. 7, 2019.

(51) Int. Cl. C07K 16/28; A61P 3/00

(52) U.S. Cl. CPC C07K 16/2869; A61P 3/00; C07K 2317/24; C07K 2317/55; C07K 2317/565

(57) ABSTRACT

Methods of treating diseases and disorders characterized by elevated levels of cortisol using an antigen binding protein specific for the GIPR polypeptide are provided. In various embodiments the disease or disorder is Cushing's syndrome.

### FIELD OF THE INVENTION

[0001] The present disclosure relates to the treatment or amelioration of Cushing's syndrome using an antigen binding protein specific for the gastric inhibitory peptide receptor (GIPR).

### BACKGROUND OF THE INVENTION

[0002] Cushing's syndrome is a rare disease caused by hypercortisolism. The most common form of endogenous Cushing's syndrome is Cushing's disease, which results from an adrenocorticotropic hormone (ACTH)-secreting pituitary tumour, responsible for 70% of all cases of ACTH-dependent Cushing's syndrome. In Cushing's disease, autonomous ACTH secretion by the tumour resulting in excess cortisol levels. Prolonged exposure to elevated cortisol levels in patients with Cushing's disease results in significant clinical burden, impaired health-related quality of life and increased mortality.

[0003] A subset of Cushing syndrome is ACTI-H independent, by ectopic over expression of the glucose-dependent insulinotropic polypeptide receptor (GIPR) expression in adrenocortical adenomas (JCI Insight. 2017; 2(18):e92184). Glucose-dependent insulinotropic polypeptide (GIP) is a single 42-amino acid peptide secreted from K-cells in the small intestine (duodenum and jejunum). Human GIP is derived from the processing of proGIP, a 153-amino acid precursor that is encoded by a gene localized to chromosome 17q (Inagaki et al., Mol Endocrinol 1989; 3:1014-1021; Fehmann et al. Endocr Rev. 1995; 16:390-410). GIP was formerly called gastric inhibitory polypeptide.

[0004] The GIP receptor (GIPR) is a member of the secretin-glucagon family of G-protein coupled receptors (GPCRs) having an extracellular N-terminus, seven transmembrane domains and an intracellular C-terminus. The N-terminal extracellular domains of this family of receptors are usually glycosylated and form the recognition and binding domain of the receptor. GIPR is highly expressed in a number of tissues, including the pancreas, gut, adipose tissue, heart, pituitary, adrenal cortex, and brain (Usdin et al., Endocrinology. 1993, 133:2861-2870). Human GIPR comprises 466 amino acids and is encoded by a gene located on chromosome 19q13.3 (Gremlich et al., Diabetes. 1995; 44:1202-8; Volz et al., FEBS Lett. 1995, 373:23-29). Studies have suggested that alternative mRNA splicing results in the production of GIP receptor variants of differing lengths in human, rat and mouse.

[0005] As such we believe a GIPR antagonistic antibody can be used to prevent the symptoms of Cushings Disease in these patients. Further there is also literature evidence that GIPR is also over expressed in the adrenal of ACTH dependent Cushing's disease (The Journal of Clinical Endocrinology & Metabolism 90(5):3009-3016), raising the possibility that GIPR antagonism may also be of therapeutic utility in the commonest cause of Cushing's syndrome is ACTH hypersecretion by corticotroph adenomas of the anterior pituitary.

### SUMMARY OF THE INVENTION

[0006] In one aspect, the present disclosure provides a method of treating a subject with Cushing's syndrome, the method comprising administering to the subject a therapeutically effective amount of an antigen binding protein that specifically binds to a protein having an amino acid sequence having at least 90% amino acid sequence identity to an amino acid sequence of a GIPR.

[0007] In one embodiment, the subject is a mammal. In another embodiment, the subject is human. In another embodiment, the GIPR is human GIPR. In another embodiment, the administering is by parenteral injection. In another embodiment, the administering is by subcutaneous injection.

### BRIEF DESCRIPTION OF THE DRAWINGS

[0008] FIG. 1. Corticosterone Levels Significantly Reduced In Plasma and WAT Levels By Both MuGIPR-Ab & GIPR-Agonist Treated Groups Compared to Vehicle Following GIP Stimulation

[0009] FIG. 2. Fasting [D-Ala²]-GIP Challenge—ARM 1

[0010] FIG. 3. Fasting [D-Ala²]-GIP Challenge—ARM 2

### DETAILED DESCRIPTION OF THE INVENTION

[0011] The present disclosure provides a method of treating Cushing's syndrome by blocking or interfering with the biological activity of GIP. In one embodiment, a therapeutically effective amount of an isolated human GIPR binding protein is administered to a subject in need thereof. Methods of administration and delivery are also provided.

[0012] Recombinant polypeptide and nucleic acid methods used herein, including in the Examples, are generally those set forth in Sambrook et al., Molecular Cloning: A Laboratory Manual (Cold Spring Harbor Laboratory Press, 1989) or Current Protocols in Molecular Biology (Ausubel et al., eds., Green Publishers Inc. and Wiley and Sons 1994), both of which are incorporated herein by reference for any purpose.

[0013] The section headings used herein are for organizational purposes only and are not to be construed as limiting the subject matter described.

[0014] Unless otherwise defined herein, scientific and technical terms used in connection with the present application shall have the meanings that are commonly understood by those of ordinary skill in the art. Further, unless otherwise required by context, singular terms shall include pluralities and plural terms shall include the singular.

[0015] Generally, nomenclatures used in connection with, and techniques of, cell and tissue culture, molecular biology, immunology, microbiology, genetics and protein and nucleic acid chemistry and hybridization described herein are those well-known and commonly used in the art. The methods and techniques of the present application are generally performed according to conventional methods well known in the art and as described in various general and more specific references that are cited and discussed throughout the present specification unless otherwise indicated. See, e.g., Sambrook et al., Molecular Cloning: A Laboratory Manual, 3rd ed., Cold Spring Harbor Laboratory Press, Cold Spring Harbor, N.Y. (2001), Ausubel et al., Current Protocols in Molecular Biology, Greene Publishing Associates (1992), and Harlow and Lane Antibodies: A Laboratory Manual Cold Spring Harbor Laboratory Press, Cold Spring Harbor, N.Y. (1990), which are incorporated herein by reference. Enzymatic reactions and purification techniques are performed according to manufacturer's specifications, as commonly accomplished in the art or as described herein. The terminology used in connection with, and the laboratory procedures and techniques of, analytical chemistry, synthetic organic chemistry, and medicinal and pharmaceutical chemistry described herein are those well-known and commonly used in the art. Standard techniques can be used for chemical syntheses, chemical analyses, pharmaceutical preparation, formulation, and delivery, and treatment of patients.

[0016] It should be understood that this invention is not limited to the particular methodology, protocols, and reagents, etc., described herein and as such may vary. The terminology used herein is for the purpose of describing particular embodiments only, and is not intended to limit the scope of the disclosed, which is defined solely by the claims.

[0017] Other than in the operating examples, or where otherwise indicated, all numbers expressing quantities of ingredients or reaction conditions used herein should be understood as modified in all instances by the term “about.” The term “about” when used in connection with percentages may mean ±1%.

[0018] Following convention, as used herein “a” and “an” mean “one or more” unless specifically indicated otherwise.

[0019] As used herein, the terms “amino acid” and “residue” are interchangeable and, when used in the context of a peptide or polypeptide, refer to both naturally occurring and synthetic amino acids, as well as amino acid analogs, amino acid mimetics and non-naturally occurring amino acids that are chemically similar to the naturally occurring amino acids.

[0020] A “naturally occurring amino acid” is an amino acid that is encoded by the genetic code, as well as those amino acids that are encoded by the genetic code that are modified after synthesis, e.g., hydroxyproline, γ-carboxyglutamate, and O-phosphoserine. An amino acid analog is a compound that has the same basic chemical structure as a naturally occurring amino acid, i.e., an a carbon that is bound to a hydrogen, a carboxyl group, an amino group, and an R group, e.g., homoserine, norleucine, methionine sulfoxide, methionine methyl sulfonium. Such analogs can have modified R groups (e.g., norleucine) or modified peptide backbones, but will retain the same basic chemical structure as a naturally occurring amino acid.

[0021] An “amino acid mimetic” is a chemical compound that has a structure that is different from the general chemical structure of an amino acid, but that functions in a manner similar to a naturally occurring amino acid. Examples include a methacryloyl or acryloyl derivative of an amide, β-, γ-, δ-amino acids (such as piperidine-4-carboxylic acid) and the like.

[0022] A “non-naturally occurring amino acid” is a compound that has the same basic chemical structure as a naturally occurring amino acid, but is not incorporated into a growing polypeptide chain by the translation complex. “Non-naturally occurring amino acid” also includes, but is not limited to, amino acids that occur by modification (e.g., posttranslational modifications) of a naturally encoded amino acid (including but not limited to, the 20 common amino acids) but are not themselves naturally incorporated into a growing polypeptide chain by the translation complex. A non-limiting list of examples of non-naturally occurring amino acids that can be inserted into a polypeptide sequence or substituted for a wild-type residue in polypeptide sequence include j-amino acids, homoamino acids, cyclic amino acids and amino acids with derivatized side chains. Examples include (in the L-form or D-form; abbreviated as in parentheses): citrulline (Cit), homocitrulline (hCit), Nα-methylcitrulline (NMeCit), Nα-methylhomocitrulline (Nα-MeHoCit), ornithine (Om), Nα-Methylornithine (Nα-MeOrn or NMeOm), sarcosine (Sar), homolysine (hLys or hK), homoarginine (hArg or hR), homoglutamine (hQ), Nα-methylarginine (NMeR), Nα-methylleucine (Nα-MeL or NMeL), N-methylhomolysine (NMeHoK), Nα-methylglutamine (NMeQ), norleucine (Nle), norvaline (Nva), 1,2,3,4-tetrahydroisoquinoline (Tic), Octahydroindole-2-carboxylic acid (Oic), 3-(1-naphthyl)alanine (1-Nal), 3-(2-naphthyl)alanine (2-Nal), 1,2,3,4-tetrahydroisoquinoline (Tic), 2-indanylglycine (IgI), para-iodophenylalanine (pI-Phe), para-aminophenylalanine (4AmP or 4-Amino-Phe), 4-guanidino phenylalanine (Guf), glycyllysine (abbreviated “K(Nε-glycyl)” or “K(glycyl)” or “K(gly)”), nitrophenylalanine (nitrophe), aminophenylalanine (aminophe or Amino-Phe), benzylphenylalanine (benzylphe), γ-carboxyglutamic acid (γ-carboxyglu), hydroxyproline (hydroxypro), p-carboxyl-phenylalanine (Cpa), α-aminoadipic acid (Aad), Nα-methyl valine (NMeVal), N-α-methyl leucine (NMeLeu), Nα-methylnorleucine (NMeNle), cyclopentylglycine (Cpg), cyclohexylglycine (Chg), acetylarginine (acetylarg), α, β-diaminopropionoic acid (Dpr), α, γ-diaminobutyric acid (Dab), diaminopropionic acid (Dap), cyclohexylalanine (Cha), 4-methyl-phenylalanine (MePhe), β, β-diphenyl-alanine (BiPhA), aminobutyric acid (Abu), 4-phenyl-phenylalanine (or biphenylalanine; 4Bip), α-amino-isobutyric acid (Aib), beta-alanine, beta-aminopropionic acid, piperidinic acid, aminocaprioic acid, aminoheptanoic acid, aminopimelic acid, desmosine, diaminopimelic acid, N-ethylglycine, N-ethylaspargine, hydroxylysine, allo-hydroxylysine, isodesmosine, allo-isoleucine, N-methylglycine, N-methylisoleucine, N-methylvaline, 4-hydroxyproline (Hyp), γ-carboxyglutamate, ε-N,N,N-trimethyllysine, ε-N-acetyllysine, O-phosphoserine, N-acetylserine, N-formylmethionine, 3-methylhistidine, 5-hydroxylysine, ω-methylarginine, 4-Amino-O-Phthalic Acid (4APA), and other similar amino acids, and derivatized forms of any of those specifically listed.

[0023] The term “isolated nucleic acid molecule” refers to a single or double-stranded polymer of deoxyribonucleotide or ribonucleotide bases read from the 5′ to the 3′ end (e.g., a GIPR nucleic acid sequence provided herein), or an analog thereof, that has been separated from at least about 50 percent of polypeptides, peptides, lipids, carbohydrates, polynucleotides or other materials with which the nucleic acid is naturally found when total nucleic acid is isolated from the source cells. Preferably, an isolated nucleic acid molecule is substantially free from any other contaminating nucleic acid molecules or other molecules that are found in the natural environment of the nucleic acid that would interfere with its use in polypeptide production or its therapeutic, diagnostic, prophylactic or research use.

[0024] The term “isolated polypeptide” refers to a polypeptide (e.g., a GIPR polypeptide sequence provided herein or an antigen binding protein of the present invention) that has been separated from at least about 50 percent of polypeptides, peptides, lipids, carbohydrates, polynucleotides, or other materials with which the polypeptide is naturally found when isolated from a source cell. Preferably, the isolated polypeptide is substantially free from any other contaminating polypeptides or other contaminants that are found in its natural environment that would interfere with its therapeutic, diagnostic, prophylactic or research use.

[0025] The term “encoding” refers to a polynucleotide sequence encoding one or more amino acids. The term does not require a start or stop codon.

[0026] The terms “identical” and percent “identity,” in the context of two or more nucleic acids or polypeptide sequences, refer to two or more sequences or subsequences that are the same. “Percent identity” means the percent of identical residues between the amino acids or nucleotides in the compared molecules and is calculated based on the size of the smallest of the molecules being compared. For these calculations, gaps in alignments (if any) can be addressed by a particular mathematical model or computer program (i.e., an “algorithm”). Methods that can be used to calculate the identity of the aligned nucleic acids or polypeptides include those described in Computational Molecular Biology, (Lesk, A. M., ed.), (1988) New York: Oxford University Press; Biocomputing Informatics and Genome Projects, (Smith, D. W., ed.), 1993, New York: Academic Press; Computer Analysis of Sequence Data, Part I, (Griffin, A. M., and Griffin, H. G., eds.), 1994, New Jersey: Humana Press; von Heinje, G., (1987) Sequence Analysis in Molecular Biology, New York: Academic Press; Sequence Analysis Primer, (Gribskov, M. and Devereux, J., eds.), 1991, New York: M. Stockton Press; and Carillo et al., (1988) SIAM J. Applied Math. 48:1073.

[0027] In calculating percent identity, the sequences being compared are aligned in a way that gives the largest match between the sequences. The computer program used to determine percent identity is the GCG program package, which includes GAP (Devereux et al., (1984) Nucl. Acid Res. 12:387; Genetics Computer Group, University of Wisconsin, Madison, Wis.). The computer algorithm GAP is used to align the two polypeptides or polynucleotides for which the percent sequence identity is to be determined. The sequences are aligned for optimal matching of their respective amino acid or nucleotide (the “matched span”, as determined by the algorithm). A gap opening penalty (which is calculated as 3× the average diagonal, wherein the “average diagonal” is the average of the diagonal of the comparison matrix being used; the “diagonal” is the score or number assigned to each perfect amino acid match by the particular comparison matrix) and a gap extension penalty (which is usually 1/10 times the gap opening penalty), as well as a comparison matrix such as PAM 250 or BLOSUM 62 are used in conjunction with the algorithm. In certain embodiments, a standard comparison matrix (see, Dayhoff et al., (1978) Atlas of Protein Sequence and Structure 5:345-352 for the PAM 250 comparison matrix; Henikoff et al., (1992) Proc. Natl. Acad. Sci. U.S.A. 89:10915-10919 for the BLOSUM 62 comparison matrix) is also used by the algorithm.

[0028] Recommended parameters for determining percent identity for polypeptides or nucleotide sequences using the GAP program are the following:

[0029] Algorithm: Needleman et al., 1970, J. Mol. Biol. 48:443-453;

[0030] Comparison matrix: BLOSUM 62 from Henikoff et al., 1992, supra;

[0031] Gap Penalty: 12 (but with no penalty for end gaps)

[0032] Gap Length Penalty: 4

[0033] Threshold of Similarity: 0

[0034] Certain alignment schemes for aligning two amino acid sequences can result in matching of only a short region of the two sequences, and this small aligned region can have very high sequence identity even though there is no significant relationship between the two full-length sequences. Accordingly, the selected alignment method (e.g., the GAP program) can be adjusted if so desired to result in an alignment that spans at least 50 contiguous amino acids of the target polypeptide.

[0035] The terms “GIPR polypeptide” and “GIPR protein” are used interchangeably and mean a naturally-occurring wild-type polypeptide expressed in a mammal, such as a human or a mouse, and includes naturally occurring alleles (e.g., naturally occurring allelic forms of human GIPR protein). For purposes of this disclosure, the term “GIPR polypeptide” can be used interchangeably to refer to any full-length GIPR polypeptide, e.g., SEQ ID NO: 3141, which consists of 466 amino acid residues and which is encoded by the nucleotide sequence SEQ ID NO: 3142, or SEQ ID NO: 3143, which consists of 430 amino acid residues and which is encoded by the nucleic acid sequence SEQ ID NO: 3144, or SEQ ID NO: 3145, which consists of 493 amino acid resides and which is encoded by the nucleic acid sequence of SEQ ID NO: 3146, or SEQ ID NO. 3147, which consists of 460 amino acids residues and which is encoded by the nucleic acid sequence of SEQ ID NO: 3148, or SEQ ID NO. 3149, which consists of 230 amino acids residues and which is encoded by the nucleic acid sequence of SEQ ID NO: 3150.

[0036] The term “GIPR polypeptide” also encompasses a GIPR polypeptide in which a naturally occurring GIPR polypeptide sequence (e.g., SEQ ID NOs: 3141, 3143 or 3145) has been modified. Such modifications include, but are not limited to, one or more amino acid substitutions, including substitutions with non-naturally occurring amino acids non-naturally-occurring amino acid analogs and amino acid mimetics.

[0037] In various embodiments, a GIPR polypeptide comprises an amino acid sequence that is at least about 85 percent identical to a naturally-occurring GIPR polypeptide (e.g., SEQ ID NOs: 3141, 3143 or 3145). In other embodiments, a GIPR polypeptide comprises an amino acid sequence that is at least about 90 percent, or about 95, 96, 97, 98, or 99 percent identical to a naturally-occurring GIPR polypeptide amino acid sequence (e.g., SEQ ID NOs: 3141, 3143 or 3145). Such GIPR polypeptides preferably, but need not, possess at least one activity of a wild-type GIPR polypeptide, such as the ability to bind GIP. The present invention also encompasses nucleic acid molecules encoding such GIPR polypeptide sequences.

[0038] The terms “GIPR activity assay” (also referred to as a “GIPR functional assay”) means an assay that can be used to measure GIP or a GIP binding protein activity in a cellular setting. In one embodiment, the “activity” (or “functional”) assay” can be a cAMP assay in GIPR expressing cells, in which GIP can induce cAMP signal, and the activity of a GIP/GIPR binding protein could be measured in the presence/absence of GIP ligand, in which IC50/EC50 and degree of inhibition/activation can be obtained (Biochemical and Biophysical Research Communications (2002) 290:1420-1426). In another embodiment, the “activity” (or “functional”) assay can be an insulin secretion assay in pancreatic beta cells, in which GIP can induce glucose-dependent insulin secretion, and the activity of a GIP/GIPR binding protein could be measured in the presence/absence of GIP ligand, in which IC50/EC50 and degree of inhibition/activation can be obtained (Biochemical and Biophysical Research Communications (2002) 290:1420-1426).

[0039] The term “GIPR binding assay” means an assay that can be used to measure binding of GIP to GIPR. In one embodiment, “GIPR binding assay” can be an assay using FMAT or FACS that measures fluorescence-labeled GIP binding to GIPR expression cells, and GIP/GIPR binding protein's activity can be measured for displacing fluorescence-labeled GIP binding to GIPR expression cells. In another embodiment, “GIPR binding assay” can be an assay that measures radioactive-labeled GIP binding to GIPR expression cells, and GIP/GIPR binding protein's activity can be measured for displacing radioactive labeled GIP binding to GIPR expression cells (Biochimica et Biophysica Acta (2001) 1547:143-155).

[0040] The terms “GIP”, “Gastric inhibitory polypeptide”, “glucose-dependent insulinotropic peptide” and “GIP ligand” are used interchangeably and mean a naturally-occurring wild-type polypeptide expressed in a mammal, such as a human or a mouse, and includes naturally occurring alleles (e.g., naturally occurring allelic forms of human GIP protein). For purposes of this disclosure, the term “GIP” can be used interchangeably to refer to any mature GIP polypeptide.

[0041] The 42 amino acid sequence of mature human GIP is:

(SEQ ID NO: 3151)
YAEGTFISDY SIAMDKIHQQ DFVNWLLAQK
GKKNDWKHNI TQ

[0042] and is encoded by the DNA sequence:

(SEQ ID NO: 3152)
tatgcggaag gcacctttat tagcgattat
agcattgcga tggataaaat tcatcagcag
gattttgtga actggctgct ggcgcagaaa
ggcaaaaaaa acgattggaa acataacatt
acccag.

[0043] The 42 amino acid sequence of mature murine GIP is:

(SEQ ID NO: 3153)
YAEGTFISDY SIAMDKIRQQ DFVNWLLAQR
GKKSDWKHNI TQ

[0044] and is encoded by the DNA sequence:

(SEQ ID NO: 3154)
tatgcggaag gcacctttat tagcgattat
agcattgcga tggataaaat tcgccagcag
gattttgtga actggctgct ggcgcagcgc
ggcaaaaaaa gcgattggaa acataacatt
acccag.

[0045] The 42 amino acid sequence of mature rat GIP is:

(SEQ ID NO: 3155)
YAEGTFISDY SIAMDKIRQQ DFVNWLLAQK
GKKNDWKHNL TQ

[0046] and is encoded by the DNA sequence:

(SEQ ID NO: 3156)
tatgcggaag gcacctttat tagcgattat agcattgcga
tggataaaat tcgccagcag gattttgtga actggctgctg
gcgcagaaag gcaaaaaaaa cgattggaaa cataacctga cccag.

[0047] An “antigen binding protein” as used herein means any protein that specifically binds a specified target antigen, such as a GIPR polypeptide (e.g., a human GIPR polypeptide such as provided in SEQ ID NOs: 3141, 3143 or 3145). The term encompasses intact antibodies that comprise at least two full-length heavy chains and two full-length light chains, as well as derivatives, variants, fragments, and mutations thereof. Examples of antibody fragments include Fab, Fab′, F(ab′)₂, and Fv fragments. An antigen binding protein also includes domain antibodies such as nanobodies and scFvs as described further below.

[0048] In general, a GIPR antigen binding protein is said to “specifically bind” its target antigen GIPR when the antigen binding protein exhibits essentially background binding to non-GIPR molecules. An antigen binding protein that specifically binds GIPR may, however, cross-react with GIPR polypeptides from different species. Typically, a GIPR antigen binding protein specifically binds human GIPR when the dissociation constant (KD) is ≤10⁻⁷ M as measured via a surface plasma resonance technique (e.g., BIACore, GE-Healthcare Uppsala, Sweden) or Kinetic Exclusion Assay (KinExA, Sapidyne, Boise, Id.). A GIPR antigen binding protein specifically binds human GIPR with “high affinity” when the KD is ≤5×10⁻⁹ M, and with “very high affinity” when the KD is ≤5×10⁻¹⁰ M, as measured using methods described.

[0049] “Antigen binding region” means a protein, or a portion of a protein, that specifically binds a specified antigen. For example, that portion of an antigen binding protein that contains the amino acid residues that interact with an antigen and confer on the antigen binding protein its specificity and affinity for the antigen is referred to as “antigen binding region.” An antigen binding region typically includes one or more “complementary binding regions” (“CDRs”) of an immunoglobulin, single-chain immunoglobulin, or camelid antibody. Certain antigen binding regions also include one or more “framework” regions. A “CDR” is an amino acid sequence that contributes to antigen binding specificity and affinity. “Framework” regions can aid in maintaining the proper conformation of the CDRs to promote binding between the antigen binding region and an antigen.

[0050] A “recombinant protein”, including a recombinant GIPR antigen binding protein, is a protein made using recombinant techniques, i.e., through the expression of a recombinant nucleic acid as described herein. Methods and techniques for the production of recombinant proteins are well known in the art.

[0051] The term “antibody” refers to an intact immunoglobulin of any isotype, or a fragment thereof that can compete with the intact antibody for specific binding to the target antigen, and includes, for instance, chimeric, humanized, fully human, and bispecific antibodies. An “antibody” as such is a species of an antigen binding protein. An intact antibody generally will comprise at least two full-length heavy chains and two full-length light chains. Antibodies may be derived solely from a single source, or may be “chimeric,” that is, different portions of the antibody may be derived from two different antibodies as described further below. The antigen binding proteins, antibodies, or binding fragments may be produced in hybridomas, by recombinant DNA techniques, or by enzymatic or chemical cleavage of intact antibodies.

[0052] The term “light chain” as used with respect to an antibody or fragments thereof includes a full-length light chain and fragments thereof having sufficient variable region sequence to confer binding specificity. A full-length light chain includes a variable region domain, VL, and a constant region domain, CL. The variable region domain of the light chain is at the amino-terminus of the polypeptide. Light chains include kappa chains and lambda chains.

[0053] The term “heavy chain” as used with respect to an antibody or fragment thereof includes a full-length heavy chain and fragments thereof having sufficient variable region sequence to confer binding specificity. A full-length heavy chain includes a variable region domain, VH, and three constant region domains, CH1, CH2, and CH3. The VH domain is at the amino-terminus of the polypeptide, and the CH domains are at the carboxyl-terminus, with the CH3 being closest to the carboxy-terminus of the polypeptide. Heavy chains may be of any isotype, including IgG (including IgG1, IgG2, IgG3 and IgG4 subtypes), IgA (including IgA1 and IgA2 subtypes), IgM and IgE.

[0054] The term “immunologically functional fragment” (or simply “fragment”) of an antibody or immunoglobulin chain (heavy or light chain), as used herein, is an antigen binding protein comprising a portion (regardless of how that portion is obtained or synthesized) of an antibody that lacks at least some of the amino acids present in a full-length chain but which is capable of specifically binding to an antigen. Such fragments are biologically active in that they bind specifically to the target antigen and can compete with other antigen binding proteins, including intact antibodies, for specific binding to a given epitope.

[0055] These biologically active fragments may be produced by recombinant DNA techniques, or may be produced by enzymatic or chemical cleavage of antigen binding proteins, including intact antibodies. Immunologically functional immunoglobulin fragments include, but are not limited to, Fab, Fab′, and F(ab′)₂ fragments.

[0056] In another embodiment, Fvs, domain antibodies and scFvs, and may be derived from an antibody of the present invention.

[0057] It is contemplated further that a functional portion of the antigen binding proteins disclosed herein, for example, one or more CDRs, could be covalently bound to a second protein or to a small molecule to create a therapeutic agent directed to a particular target in the body, possessing bifunctional therapeutic properties, or having a prolonged serum half-life.

[0058] A “Fab fragment” is comprised of one light chain and the CH1 and variable regions of one heavy chain. The heavy chain of a Fab molecule cannot form a disulfide bond with another heavy chain molecule.

[0059] An “Fc” region contains two heavy chain fragments comprising the CH2 and CH3 domains of an antibody. The two heavy chain fragments are held together by two or more disulfide bonds and by hydrophobic interactions of the CH3 domains.

[0060] An “Fab′ fragment” contains one light chain and a portion of one heavy chain that contains the VH domain and the CH1 domain and also the region between the CH1 and CH2 domains, such that an interchain disulfide bond can be formed between the two heavy chains of two Fab′ fragments to form an F(ab′)2 molecule.

[0061] An “F(ab′)2 fragment” contains two light chains and two heavy chains containing a portion of the constant region between the CH1 and CH2 domains, such that an interchain disulfide bond is formed between the two heavy chains. A F(ab′)2 fragment thus is composed of two Fab′ fragments that are held together by a disulfide bond between the two heavy chains.

[0062] The “Fv region” comprises the variable regions from both the heavy and light chains, but lacks the constant regions.

[0063] “Single chain antibodies” or “scFvs” are Fv molecules in which the heavy and light chain variable regions have been connected by a flexible linker to form a single polypeptide chain, which forms an antigen-binding region. scFvs are discussed in detail in International Patent Application Publication No. WO 88/01649 and U.S. Pat. Nos. 4,946,778 and 5,260,203, the disclosures of which are incorporated by reference.

[0064] A “domain antibody” or “single chain immunoglobulin” is an immunologically functional immunoglobulin fragment containing only the variable region of a heavy chain or the variable region of a light chain. Examples of domain antibodies include Nanobodies®. In some instances, two or more VH regions are covalently joined with a peptide linker to create a bivalent domain antibody. The two VH regions of a bivalent domain antibody may target the same or different antigens.

[0065] A “bivalent antigen binding protein” or “bivalent antibody” comprises two antigen binding regions. In some instances, the two binding regions have the same antigen specificities. Bivalent antigen binding proteins and bivalent antibodies may be bispecific, see, infra.

[0066] A multispecific antigen binding protein” or “multispecific antibody” is one that targets more than one antigen or epitope.

[0067] A “bispecific,” “dual-specific” or “bifunctional” antigen binding protein or antibody is a hybrid antigen binding protein or antibody, respectively, having two different antigen binding sites. Bispecific antigen binding proteins and antibodies are a species of multispecific antigen binding protein or multispecific antibody and may be produced by a variety of methods including, but not limited to, fusion of hybridomas or linking of Fab′ fragments. See, e.g., Songsivilai and Lachmann, 1990, Clin. Exp. Immunol. 79:315-321; Kostelny et al., 1992, J. Immunol. 148:1547-1553. The two binding sites of a bispecific antigen binding protein or antibody will bind to two different epitopes, which may reside on the same or different protein targets.

[0068] The term “compete” when used in the context of antigen binding proteins (e.g., antibodies) means competition between antigen binding proteins is determined by an assay in which the antigen binding protein (e.g., antibody or immunologically functional fragment thereof) under test prevents or inhibits specific binding of a reference antigen binding protein to a common antigen (e.g., GIPR or a fragment thereof). Numerous types of competitive binding assays can be used, for example: solid phase direct or indirect radioimmunoassay (RIA), solid phase direct or indirect enzyme immunoassay (EIA), sandwich competition assay (see, e.g., Stahli et al., 1983, Methods in Enzymology 9:242-253); solid phase direct biotin-avidin EIA (see, e.g., Kirkland et al., 1986, J. Immunol. 137:3614-3619) solid phase direct labeled assay, solid phase direct labeled sandwich assay (see, e.g., Harlow and Lane, 1988, Antibodies, A Laboratory Manual, Cold Spring Harbor Press); solid phase direct label RIA using I-125 label (see, e.g., Morel et al., 1988, Molec. Immunol. 25:7-15); solid phase direct biotin-avidin EIA (see, e.g., Cheung, et al., 1990, Virology 176:546-552); and direct labeled RIA (Moldenhauer et al., 1990, Scand. J. Immunol. 32:77-82). Typically, such an assay involves the use of purified antigen bound to a solid surface or cells bearing either of these, an unlabeled test antigen binding protein and a labeled reference antigen binding protein. Competitive inhibition is measured by determining the amount of label bound to the solid surface or cells in the presence of the test antigen binding protein. Usually the test antigen binding protein is present in excess. Additional details regarding methods for determining competitive binding are provided in the examples herein. Usually, when a competing antigen binding protein is present in excess, it will inhibit specific binding of a reference antigen binding protein to a common antigen by at least 40%, 45%, 50%, 55%, 60%, 65%, 70% or 75%. In some instances, binding is inhibited by at least 80%, 85%, 90%, 95%, or 97% or more.

[0069] The term “antigen” refers to a molecule or a portion of a molecule capable of being bound by a selective binding agent, such as an antigen binding protein (including, e.g., an antibody), and additionally capable of being used in an animal to produce antibodies capable of binding to that antigen. An antigen may possess one or more epitopes that are capable of interacting with different antigen binding proteins, e.g., antibodies.

[0070] The term “epitope” is the portion of a molecule that is bound by an antigen binding protein (for example, an antibody). The term includes any determinant capable of specifically binding to an antigen binding protein, such as an antibody. An epitope can be contiguous or non-contiguous (discontinuous) (e.g., in a polypeptide, amino acid residues that are not contiguous to one another in the polypeptide sequence but that within in context of the molecule are bound by the antigen binding protein). A conformational epitope is an epitope that exists within the conformation of an active protein but is not present in a denatured protein. In certain embodiments, epitopes may be mimetic in that they comprise a three dimensional structure that is similar to an epitope used to generate the antigen binding protein, yet comprise none or only some of the amino acid residues found in that epitope used to generate the antigen binding protein. Most often, epitopes reside on proteins, but in some instances may reside on other kinds of molecules, such as nucleic acids. Epitope determinants may include chemically active surface groupings of molecules such as amino acids, sugar side chains, phosphoryl or sulfonyl groups, and may have specific three dimensional structural characteristics, and/or specific charge characteristics. Generally, antigen binding proteins specific for a particular target antigen will preferentially recognize an epitope on the target antigen in a complex mixture of proteins and/or macromolecules.

[0071] As used herein, “substantially pure” means that the described species of molecule is the predominant species present, that is, on a molar basis it is more abundant than any other individual species in the same mixture. In certain embodiments, a substantially pure molecule is a composition wherein the object species comprises at least 50% (on a molar basis) of all macromolecular species present. In other embodiments, a substantially pure composition will comprise at least 80%, 85%, 90%, 95%, 96%, 97%, 98%, or 99% of all macromolecular species present in the composition. In other embodiments, the object species is purified to essential homogeneity wherein contaminating species cannot be detected in the composition by conventional detection methods and thus the composition consists of a single detectable macromolecular species.

[0072] The term “treating” refers to any indicia of success in the treatment or amelioration of an injury, pathology or condition, including any objective or subjective parameter such as abatement; remission; diminishing of symptoms or making the injury, pathology or condition more tolerable to the patient; slowing in the rate of degeneration or decline; making the final point of degeneration less debilitating; improving a patient's physical or mental well-being. The treatment or amelioration of symptoms can be based on objective or subjective parameters; including the results of a physical examination, neuropsychiatric exams, and/or a psychiatric evaluation. For example, certain methods presented herein successfully treat Cushing's syndrome by decreasing cortisol levels and/or ameliorating a symptom associated with Cushing's syndrome. Cushing's syndrome can be ACTH-dependent resulting from pituitary tumors that produce excess ACTH in the pituitary and stimulate the adrenal glands to make excess cortiosol. Other types of tumors can produce ACTH, including those in the lungs, pancreas, and thyroid, and also result in excess cortisol production. Additionally, a tumor on the adrenal gland can also cause the excess production of cortisol. In the case of food-dependent Cushing's syndrome, the ingestion of dietary food causes normal release of GIP from the gut, which drives excess cortisol production through GIPR expression in adrenocortical adenomas (JCI Insight. 2017; 2(18):e92184).

[0073] An “effective amount” is generally an amount sufficient to reduce the severity and/or frequency of symptoms, eliminate the symptoms and/or underlying cause, prevent the occurrence of symptoms and/or their underlying cause, and/or improve or remediate the damage that results from or is associated with the disease state (e.g., Cushing's syndrome). In some embodiments, the effective amount is a therapeutically effective amount or a prophylactically effective amount. A “therapeutically effective amount” is an amount sufficient to remedy a disease state (e.g. atherosclerosis) or symptoms, particularly a state or symptoms associated with the disease state, or otherwise prevent, hinder, retard or reverse the progression of the disease state or any other undesirable symptom associated with the disease in any way whatsoever. A “prophylactically effective amount” is an amount of a pharmaceutical composition that, when administered to a subject, will have the intended prophylactic effect, e.g., preventing or delaying the onset (or reoccurrence) of the disease state, or reducing the likelihood of the onset (or reoccurrence) of the disease state or associated symptoms. The full therapeutic or prophylactic effect does not necessarily occur by administration of one dose, and may occur only after administration of a series of doses. Thus, a therapeutically or prophylactically effective amount may be administered in one or more administrations.

[0074] The terms “therapeutically effective dose” and “therapeutically effective amount,” as used herein, means an amount of a GIPR binding protein that elicits a biological or medicinal response in a tissue system, animal, or human being sought by a researcher, physician, or other clinician, which includes alleviation or amelioration of the symptoms of the disease or disorder being treated, i.e., an amount of a GIPR binding protein that supports an observable level of one or more desired biological or medicinal response, for example lowering cortisol levels.

[0075] The term “polynucleotide” or “nucleic acid” includes both single-stranded and double-stranded nucleotide polymers. The nucleotides comprising the polynucleotide can be ribonucleotides or deoxyribonucleotides or a modified form of either type of nucleotide. The modifications include base modifications such as bromouridine and inosine derivatives, ribose modifications such as 2′,3′-dideoxyribose, and intemucleotide linkage modifications such as phosphorothioate, phosphorodithioate, phosphoroselenoate, phosphorodiselenoate, phosphoroanilothioate, phoshoraniladate and phosphoroamidate.

[0076] The term “oligonucleotide” means a polynucleotide comprising 200 or fewer nucleotides. In some embodiments, oligonucleotides are 10 to 60 bases in length. In other embodiments, oligonucleotides are 12, 13, 14, 15, 16, 17, 18, 19, or 20 to 40 nucleotides in length. Oligonucleotides may be single stranded or double stranded, e.g., for use in the construction of a mutant gene. Oligonucleotides may be sense or antisense oligonucleotides. An oligonucleotide can include a label, including a radiolabel, a fluorescent label, a hapten or an antigenic label, for detection assays. Oligonucleotides may be used, for example, as PCR primers, cloning primers or hybridization probes.

[0077] An “isolated nucleic acid molecule” means a DNA or RNA of genomic, mRNA, cDNA, or synthetic origin or some combination thereof which is not associated with all or a portion of a polynucleotide in which the isolated polynucleotide is found in nature, or is linked to a polynucleotide to which it is not linked in nature. For purposes of this disclosure, it should be understood that “a nucleic acid molecule comprising” a particular nucleotide sequence does not encompass intact chromosomes. Isolated nucleic acid molecules “comprising” specified nucleic acid sequences may include, in addition to the specified sequences, coding sequences for up to ten or even up to twenty other proteins or portions thereof, or may include operably linked regulatory sequences that control expression of the coding region of the recited nucleic acid sequences, and/or may include vector sequences.

[0078] Unless specified otherwise, the left-hand end of any single-stranded polynucleotide sequence discussed herein is the 5′ end; the left-hand direction of double-stranded polynucleotide sequences is referred to as the 5′ direction. The direction of 5′ to 3′ addition of nascent RNA transcripts is referred to as the transcription direction; sequence regions on the DNA strand having the same sequence as the RNA transcript that are 5′ to the 5′ end of the RNA transcript are referred to as “upstream sequences;” sequence regions on the DNA strand having the same sequence as the RNA transcript that are 3′ to the 3′ end of the RNA transcript are referred to as “downstream sequences.”

[0079] The term “control sequence” refers to a polynucleotide sequence that can affect the expression and processing of coding sequences to which it is ligated. The nature of such control sequences may depend upon the host organism. In particular embodiments, control sequences for prokaryotes may include a promoter, a ribosomal binding site, and a transcription termination sequence. For example, control sequences for eukaryotes may include promoters comprising one or a plurality of recognition sites for transcription factors, transcription enhancer sequences, and transcription termination sequences. “Control sequences” can include leader sequences and/or fusion partner sequences.

[0080] The term “vector” means any molecule or entity (e.g., nucleic acid, plasmid, bacteriophage or virus) used to transfer protein coding information into a host cell.

[0081] The term “expression vector” or “expression construct” refers to a vector that is suitable for transformation of a host cell and contains nucleic acid sequences that direct and/or control (in conjunction with the host cell) expression of one or more heterologous coding regions operatively linked thereto. An expression construct may include, but is not limited to, sequences that affect or control transcription, translation, and, if introns are present, affect RNA splicing of a coding region operably linked thereto.

[0082] As used herein, “operably linked” means that the components to which the term is applied are in a relationship that allows them to carry out their inherent functions under suitable conditions. For example, a control sequence in a vector that is “operably linked” to a protein coding sequence is ligated thereto so that expression of the protein coding sequence is achieved under conditions compatible with the transcriptional activity of the control sequences.

[0083] The term “host cell” means a cell that has been transformed with a nucleic acid sequence and thereby expresses a gene of interest. The term includes the progeny of the parent cell, whether or not the progeny is identical in morphology or in genetic make-up to the original parent cell, so long as the gene of interest is present.

[0084] The terms “polypeptide” or “protein” are used interchangeably herein to refer to a polymer of amino acid residues. The terms also apply to amino acid polymers in which one or more amino acid residues is an analog or mimetic of a corresponding naturally occurring amino acid, as well as to naturally occurring amino acid polymers. The terms can also encompass amino acid polymers that have been modified, e.g., by the addition of carbohydrate residues to form glycoproteins, or phosphorylated. Polypeptides and proteins can be produced by a naturally-occurring and non-recombinant cell; or it is produced by a genetically-engineered or recombinant cell, and comprise molecules having the amino acid sequence of the native protein, or molecules having deletions from, additions to, and/or substitutions of one or more amino acids of the native sequence. The terms “polypeptide” and “protein” specifically encompass GIPR antigen binding proteins, antibodies, or sequences that have deletions from, additions to, and/or substitutions of one or more amino acids of an antigen-binding protein. The term “polypeptide fragment” refers to a polypeptide that has an amino-terminal deletion, a carboxyl-terminal deletion, and/or an internal deletion as compared with the full-length protein. Such fragments may also contain modified amino acids as compared with the full-length protein. In certain embodiments, fragments are about five to 500 amino acids long. For example, fragments may be at least 5, 6, 8, 10, 14, 20, 50, 70, 100, 110, 150, 200, 250, 300, 350, 400, or 450 amino acids long. Useful polypeptide fragments include immunologically functional fragments of antibodies, including binding domains.

[0085] The term “isolated protein” means that a subject protein (1) is free of at least some other proteins with which it would normally be found, (2) is essentially free of other proteins from the same source, e.g., from the same species, (3) is expressed by a cell from a different species, (4) has been separated from at least about 50 percent of polynucleotides, lipids, carbohydrates, or other materials with which it is associated in nature, (5) is operably associated (by covalent or noncovalent interaction) with a polypeptide with which it is not associated in nature, or (6) does not occur in nature. Typically, an “isolated protein” constitutes at least about 5%, at least about 10%, at least about 25%, or at least about 50% of a given sample. Genomic DNA, cDNA, mRNA or other RNA, of synthetic origin, or any combination thereof may encode such an isolated protein. Preferably, the isolated protein is substantially free from proteins or polypeptides or other contaminants that are found in its natural environment that would interfere with its therapeutic, diagnostic, prophylactic, research or other use.

[0086] A “variant” of a polypeptide (e.g., an antigen binding protein such as an antibody) comprises an amino acid sequence wherein one or more amino acid residues are inserted into, deleted from and/or substituted into the amino acid sequence relative to another polypeptide sequence. Variants include fusion proteins.

[0087] A “derivative” of a polypeptide is a polypeptide (e.g., an antigen binding protein such as an antibody) that has been chemically modified in some manner distinct from insertion, deletion, or substitution variants, e.g., via conjugation to another chemical moiety.

[0088] The term “naturally occurring” as used throughout the specification in connection with biological materials such as polypeptides, nucleic acids, host cells, and the like, refers to materials which are found in nature.

[0089] A “subject” or “patient” as used herein can be any mammal. In a typical embodiment, the subject or patient is a human.

[0090] As disclosed herein, a GIPR polypeptide described by the instant disclosure can be engineered and/or produced using standard molecular biology methodology. In various examples, a nucleic acid sequence encoding a GIPR, which can comprise all or a portion of SEQ ID NOs: 1, 3 or 5, can be isolated and/or amplified from genomic DNA, or cDNA using appropriate oligonucleotide primers. Primers can be designed based on the nucleic and amino acid sequences provided herein according to standard (RT)-PCR amplification techniques. The amplified GIPR nucleic acid can then be cloned into a suitable vector and characterized by DNA sequence analysis.

[0091] Oligonucleotides for use as probes in isolating or amplifying all or a portion of the GIPR sequences provided herein can be designed and generated using standard synthetic techniques, e.g., automated DNA synthesis apparatus, or can be isolated from a longer sequence of DNA.

[0092] The 466 amino acid sequence of human GIPR is (Volz et al., FEBS Lett. 373:23-29 (1995); NCBI Reference Sequence: NP_0001555):

(SEQ ID NO: 3141)
MTTSPILQLL LRLSLCGLLL QRAETGSKGQ TAGELYQRWE
RYRRECQETL AAAEPPSGLA CNGSFDMYVC WDYAAPNATA
RASCPWYLPW HHHVAAGFVL RQCGSDGQWG LWRDHTQCEN
PEKNEAFLDQ RLILERLQVM YTVGYSLSLA TLLLALLILS
LFRRLHCTRN YIHINLFTSF MLRAAAILSR DRLLPRPGPY
LGDQALALWN QALAACRTAQ IVTQYCVGAN YTWLLVEGVY
LHSLLVLVGG SEEGHFRYYL LLGWGAPALF VIPWVIVRYL
YENTQCWERN EVKAIWWIIR TPILMTILIN FLIFIRILGI
LLSKLRTRQM RCRDYRLRLA RSTLTLVPLL GVHEVVFAPV
TEEQARGALR FAKLGFEIFL SSFQGFLVSV LYCFINKEVQ
SEIRRGWHHC RLRRSLGEEQ RQLPERAFRA LPSGSGPGEV
PTSRGLSSGT LPGPGNEASR ELESYC

[0093] and is encoded by the DNA sequence (NCBI Reference Sequence: NM_000164):

(SEQ ID NO: 3142)
ggcagcggtg gcaggggctg caggagcaag tgaccaggag caggactggg
gacaggcctg atcgcccctg cacgaaccag acccttcgcc gccctcacga
tgactacctc tccgatcctg cagctgctgc tgcggctctc actgtgcggg
ctgctgctcc agagggcgga gacaggctct aaggggcaga cggcggggga
gctgtaccag cgctgggaac ggtaccgcag ggagtgccag gagaccttgg
cagccgcgga accgccttca ggcctcgcct gtaacgggtc cttcgatatg
tacgtctgct gggactatgc tgcacccaat gccactgccc gtgcgtcctg
cccctggtac ctgccctggc accaccatgt ggctgcaggt ttcgtcctcc
gccagtgtgg cagtgatggc caatggggac tttggagaga ccatacacaa
tgtgagaacc cagagaagaa tgaggccttt ctggaccaaa ggctcatctt
ggagcggttg caggtcatgt acactgtcgg ctactccctg tctctcgcca
cactgctgct agccctgctc atcttgagtt tgttcaggcg gctacattgc
actagaaact atatccacat caacctgttc acgtctttca tgctgcgagc
tgcggccatt ctcagccgag accgtctgct acctcgacct ggcccctacc
ttggggacca ggcccttgcg ctgtggaacc aggccctcgc tgcctgccgc
acggcccaga tcgtgaccca gtactgcgtg ggtgccaact acacgtggct
gctggtggag ggcgtctacc tgcacagtct cctggtgctc gtgggaggct
ccgaggaggg ccacttccgc tactacctgc tcctcggctg gggggccccc
gcgcttttcg tcattccctg ggtgatcgtc aggtacctgt acgagaacac
gcagtgctgg gagcgcaacg aagtcaaggc catttggtgg attatacgga
cccccatcct catgaccatc ttgattaatt tcctcatttt tatccgcatt
cttggcattc tcctgtccaa gctgaggaca cggcaaatgc gctgccggga
ttaccggctg aggctggctc gctccacgct gacgctggtg cccctgctgg
gtgtccacga ggtggtgttt gctcccgtga cagaggaaca ggcccggggc
gccctgcgct tcgccaagct cggctttgag atcttcctca gctccttcca
gggcttcctg gtcagcgtcc tctactgctt catcaacaag gaggtgcagt
cggagatccg ccgtggctgg caccactgcc gcctgcgccg cagcctgggc
gaggagcaac gccagctccc ggagcgcgcc ttccgggccc tgccctccgg
ctccggcccg ggcgaggtcc ccaccagccg cggcttgtcc tcggggaccc
tcccagggcc tgggaatgag gccagccggg agttggaaag ttactgctag
ggggcgggat ccccgtgtct gttcagttag catggattta ttgagtgcca
actgcgtgcc aggcccagta cggaggacgc tggggaaatg gtgaaggaaa
cagaaaaaag gtccctgccc ttctggagat gacaactgag tggggaaaac
agaccgtgaa cacaaaacat caagttccac acacgctatg gaatggttat
gaagggaagc gagaaggggg cctagggtgg tctgggaggc gtctccaagg
aggtgacact taagccatcc ccgaaagagg tgaaagagat cactttgggg
agagctggag aacaggattc taggcggaag cgatagcata ggcaaaggcc
cttgggcagg aaggcgctca gccttggctg gagtagaatt aagtcagagc
caacaggtgg ggagagacag agaagtgggc aggggcaccc aagttgggat
ttcatttcag gtgcattgga gattcttagg agtgtctctt gggggtaata
ttttattttt taaaaaatga ggat.

[0094] A 430 amino acid isoform of human GIPR (isoform X1), predicted by automated computational analysis, has the sequence (NCBI Reference Sequence XP_005258790):

(SEQ ID NO: 3143)
MTTSPILQLL LRLSLCGLLL QRAETGSKGQ TAGELYQRWE
RYRRECQETL AAAEPPSVAA GFVLRQCGSD GQWGLWRDHT
QCENPEKNEA FLDQRLILER LQVMYTVGYS LSLATLLLAL
LILSLFRRLH CTRNYIHINL FTSFMLRAAA ILSRDRLLPR
PGPYLGDQAL ALWNQALAAC RTAQIVTQYC VGANYTWLLV
EGVYLHSLLV LVGGSEEGHF RYYLLLGWGA PALFVIPWVI
VRYLYENTQC WERNEVKAIW WIIRTPILMT ILINFLIFIR
ILGILLSKLR TRQMRCRDYR LRLARSTLTL VPLLGVHEVV
FAPVTEEQAR GALRFAKLGF EIFLSSFQGF LVSVLYCFIN
KEVQSEIRRG WHHCRLRRSL GEEQRQLPER AFRALPSGSG
PGEVPTSRGL SSGTLPGPGN EASRELESYC

[0095] and is encoded by the DNA sequence:

(SEQ ID NO: 3144)
atgaccacca gcccgattct gcagctgctg ctgcgcctga
gcctgtgcgg cctgctgctg cagcgcgcgg aaaccggcag
caaaggccag accgcgggcg aactgtatca gcgctgggaa
cgctatcgcc gcgaatgcca ggaaaccctg gcggcggcgg
aaccgccgag cgtggcggcg ggctttgtgc tgcgccagtg
cggcagcgat ggccagtggg gcctgtggcg cgatcatacc
cagtgcgaaa acccggaaaa aaacgaagcg tttctggatc
agcgcctgat tctggaacgc ctgcaggtga tgtataccgt
gggctatagc ctgagcctgg cgaccctgct gctggcgctg
ctgattctga gcctgtttcg ccgcctgcat tgcacccgca
actatattca tattaacctg tttaccagct ttatgctgcg
cgcggcggcg attctgagcc gcgatcgcct gctgccgcgc
ccgggcccgt atctgggcga tcaggcgctg gcgctgtgga
accaggcgct ggcggcgtgc cgcaccgcgc agattgtgac
ccagtattgc gtgggcgcga actatacctg gctgctggtg
gaaggcgtgt atctgcatag cctgctggtg ctggtgggcg
gcagcgaaga aggccatttt cgctattatc tgctgctggg
ctggggcgcg ccggcgctgt ttgtgattcc gtgggtgatt
gtgcgctatc tgtatgaaaa cacccagtgc tgggaacgca
acgaagtgaa agcgatttgg tggattattc gcaccccgat
tctgatgacc attctgatta actttctgat ttttattcgc
attctgggca ttctgctgag caaactgcgc acccgccaga
tgcgctgccg cgattatcgc ctgcgcctgg cgcgcagcac
cctgaccctg gtgccgctgc tgggcgtgca tgaagtggtg
tttgcgccgg tgaccgaaga acaggcgcgc ggcgcgctgc
gctttgcgaa actgggcttt gaaatttttc tgagcagctt
tcagggcttt ctggtgagcg tgctgtattg ctttattaac
aaagaagtgc agagcgaaat tcgccgcggc tggcatcatt
gccgcctgcg ccgcagcctg ggcgaagaac agcgccagct
gccggaacgc gcgtttcgcg cgctgccgag cggcagcggc
ccgggcgaag tgccgaccag ccgcggcctg agcagcggca
ccctgccggg cccgggcaac gaagcgagcc gcgaactgga
aagctattgc

[0096] A 493 amino acid isoform of human GIPR, produced by alternative splicing, has the sequence (Gremlich et al., Diabetes 44:1202-8 (1995); UniProtKB Sequence Identifier: P48546-2):

(SEQ ID NO: 3145)
MTTSPILQLL LRLSLCGLLL QRAETGSKGQ TAGELYQRWE
RYRRECQETL AAAEPPSGLA CNGSFDMYVC WDYAAPNATA
RASCPWYLPW HHHVAAGFVL RQCGSDGQWG LWRDHTQCEN
PEKNEAFLDQ RLILERLQVM YTVGYSLSLA TLLLALLILS
LFRRLHCTRN YIHINLFTSF MLRAAAILSR DRLLPRPGPY
LGDQALALWN QALAACRTAQ IVTQYCVGAN YTWLLVEGVY
LHSLLVLVGG SEEGHFRYYL LLGWGAPALF VIPWVIVRYL
YENTQCWERN EVKAIWWIIR TPILMTILIN FLIFIRILGI
LLSKLRTRQM RCRDYRLRLA RSTLTLVPLL GVHEVVFAPV
TEEQARGALR FAKLGFEIFL SSFQGFLVSV LYCFINKEVG
RDPAAAPALW RRRGTAPPLS AIVSQVQSEI RRGWHHCRLR
RSLGEEQRQL PERAFRALPS GSGPGEVPTS RGLSSGTLPG
PGNEASRELE SYC

[0097] and is encoded by the DNA sequence:

(SEQ ID NO: 3146)
atgaccacca gcccgattct gcagctgctg ctgcgcctga gcctgtgcgg
cctgctgctg cagcgcgcgg aaaccggcag caaaggccag accgcgggcg
aactgtatca gcgctgggaa cgctatcgcc gcgaatgcca ggaaaccctg
gcggcggcgg aaccgccgag cggcctggcg tgcaacggca gctttgatat
gtatgtgtgc tgggattatg cggcgccgaa cgcgaccgcg cgcgcgagct
gcccgtggta tctgccgtgg catcatcatg tggcggcggg ctttgtgctg
cgccagtgcg gcagcgatgg ccagtggggc ctgtggcgcg atcataccca
gtgcgaaaac ccggaaaaaa acgaagcgtt tctggatcag cgcctgattc
tggaacgcct gcaggtgatg tataccgtgg gctatagcct gagcctggcg
accctgctgc tggcgctgct gattctgagc ctgtttcgcc gcctgcattg
cacccgcaac tatattcata ttaacctgtt taccagcttt atgctgcgcg
cggcggcgat tctgagccgc gatcgcctgc tgccgcgccc gggcccgtat
ctgggcgatc aggcgctggc gctgtggaac caggcgctgg cggcgtgccg
caccgcgcag attgtgaccc agtattgcgt gggcgcgaac tatacctggc
tgctggtgga aggcgtgtat ctgcatagcc tgctggtgct ggtgggcggc
agcgaagaag gccattttcg ctattatctg ctgctgggct ggggcgcgcc
ggcgctgttt gtgattccgt gggtgattgt gcgctatctg tatgaaaaca
cccagtgctg ggaacgcaac gaagtgaaag cgatttggtg gattattcgc
accccgattc tgatgaccat tctgattaac tttctgattt ttattcgcat
tctgggcatt ctgctgagca aactgcgcac ccgccagatg cgctgccgcg
attatcgcct gcgcctggcg cgcagcaccc tgaccctggt gccgctgctg
ggcgtgcatg aagtggtgtt tgcgccggtg accgaagaac aggcgcgcgg
cgcgctgcgc tttgcgaaac tgggctttga aatttttctg agcagctttc
agggctttct ggtgagcgtg ctgtattgct ttattaacaa agaagtgggc
cgcgatccgg cggcggcgcc ggcgctgtgg cgccgccgcg gcaccgcgcc
gccgctgagc gcgattgtga gccaggtgca gagcgaaatt cgccgcggct
ggcatcattg ccgcctgcgc cgcagcctgg gcgaagaaca gcgccagctg
ccggaacgcg cgtttcgcgc gctgccgagc ggcagcggcc cgggcgaagt
gccgaccagc cgcggcctga gcagcggcac cctgccgggc ccgggcaacg
aagcgagccg cgaactggaa agctattgct aa

[0098] The 460 amino acid sequence of murine GIPR is (NCBI Reference Sequence: NP_001074284; uniprotKB/Swiss-Prot Q0P543-1); see Vassilatis et al., PNAS USA 2003, 100:4903-4908.

(SEQ ID NO: 3147)
MPLRLLLLLL WLWGLQWAET DSEGQTTTGE LYQRWEHYGQ
ECQKMLETTE PPSGLACNGS FDMYACWNYT AANTTARVSC
PWYLPWFRQV SAGFVFRQCG SDGQWGSWRD HTQCENPEKN
GAFQDQTLIL ERLQIMYTVG YSLSLTTLLL ALLILSLFRR
LHCTRNYIHM NLFTSFMLRA AAILTRDQLL PPLGPYTGDQ
APTPWNQALA ACRTAQIMTQ YCVGANYTWL LVEGVYLHHL
LVIVGRSEKG HFRCYLLLGW GAPALFVIPW VIVRYLRENT
QCWERNEVKA IWWIIRTPIL ITILINFLIF IRILGILVSK
LRTRQMRCPD YRLRLARSTL TLVPLLGVHE VVFAPVTEEQ
VEGSLRFAKL AFEIFLSSFQ GFLVSVLYCFINKEVQSEIRQ
GWRHRRLRLS LQEQRPRPHQ ELAPRAVPLS SACREAAVGN
ALPSGMLHVP GDEVLESYC

[0099] and is encoded by the DNA sequence (NCBI Reference Sequence: NM_001080815):

(SEQ ID NO: 3148)
atgccgctgc gcctgctgct gctgctgctg tggctgtggg gcctgcagtg
ggcggaaacc gatagcgaag gccagaccac caccggcgaa ctgtatcagc
gctgggaaca ttatggccag gaatgccaga aaatgctgga aaccaccgaa
ccgccgagcg gcctggcgtg caacggcagc tttgatatgt atgcgtgctg
gaactatacc gcggcgaaca ccaccgcgcg cgtgagctgc ccgtggtatc
tgccgtggtt tcgccaggtg agcgcgggct ttgtgtttcg ccagtgcggc
agcgatggcc agtggggcag ctggcgcgat catacccagt gcgaaaaccc
ggaaaaaaac ggcgcgtttc aggatcagac cctgattctg gaacgcctgc
agattatgta taccgtgggc tatagcctga gcctgaccac cctgctgctg
gcgctgctga ttctgagcct gtttcgccgc ctgcattgca cccgcaacta
tattcatatg aacctgttta ccagctttat gctgcgcgcg gcggcgattc
tgacccgcga tcagctgctg ccgccgctgg gcccgtatac cggcgatcag
gcgccgaccc cgtggaacca ggcgctggcg gcgtgccgca ccgcgcagat
tatgacccag tattgcgtgg gcgcgaacta tacctggctg ctggtggaag
gcgtgtatct gcatcatctg ctggtgattg tgggccgcag cgaaaaaggc
cattttcgct gctatctgct gctgggctgg ggcgcgccgg cgctgtttgt
gattccgtgg gtgattgtgc gctatctgcg cgaaaacacc cagtgctggg
aacgcaacga agtgaaagcg atttggtgga ttattcgcac cccgattctg
attaccattc tgattaactt tctgattttt attcgcattc tgggcattct
ggtgagcaaa ctgcgcaccc gccagatgcg ctgcccggat tatcgcctgc
gcctggcgcg cagcaccctg accctggtgc cgctgctggg cgtgcatgaa
gtggtgtttg cgccggtgac cgaagaacag gtggaaggca gcctgcgctt
tgcgaaactg gcgtttgaaa tttttctgag cagctttcag ggctttctgg
tgagcgtgct gtattgcttt attaacaaag aagtgcagag cgaaattcgc
cagggctggc gccatcgccg cctgcgcctg agcctgcagg aacagcgccc
gcgcccgcat caggaactgg cgccgcgcgc ggtgccgctg agcagcgcgt
gccgcgaagc ggcggtgggc aacgcgctgc cgagcggcat gctgcatgtg
ccgggcgatg aagtgctgga aagctattgc taa

[0100] A 230 amino acid isoform of murine GIPR, produced by alternative splicing, has the sequence (Gerhard et al., Genome Res, 14:2121-2127 (2004); NCBI Reference Sequence: AA120674):

(SEQ ID NO: 3149)
MPLRLLLLLL WLWGLQWAET DSEGQTTTGE LYQRWEHYGQ
ECQKMLETTE PPSGLACNGS FDMYACWNYT AANTTARVSC
PWYLPWFRQV SAGFVFRQCG SDGQWGSWRD HTQCENPEKN
GAFQDQTLIL ERLQIMYTVG YSLSLTTLLL ALLILSLFRR
LHCTRNYIHM NLFTSFMLRA AAILTRDQLL PPLGPYTGDQ
APTPWNQVLH RLLPGGTKTF PIYFRTFPHH

[0101] and is encoded by the DNA sequence:

(SEQ ID NO: 3150)
atgccgctgc gcctgctgct gctgctgctg tggctgtggg gcctgcagtg
ggcggaaacc gatagcgaag gccagaccac caccggcgaa ctgtatcagc
gctgggaaca ttatggccag gaatgccaga aaatgctgga aaccaccgaa
ccgccgagcg gcctggcgtg caacggcagc tttgatatgt atgcgtgctg
gaactatacc gcggcgaaca ccaccgcgcg cgtgagctgc ccgtggtatc
tgccgtggtt tcgccaggtg agcgcgggct ttgtgtttcg ccagtgcggc
agcgatggcc agtggggcag ctggcgcgat catacccagt gcgaaaaccc
ggaaaaaaac ggcgcgtttc aggatcagac cctgattctg gaacgcctgc
agattatgta taccgtgggc tatagcctga gcctgaccac cctgctgctg
gcgctgctga ttctgagcct gtttcgccgc ctgcattgca cccgcaacta
tattcatatg aacctgttta ccagctttat gctgcgcgcg gcggcgattc
tgacccgcga tcagctgctg ccgccgctgg gcccgtatac cggcgatcag
gcgccgaccc cgtggaacca ggtgctgcat cgcctgctgc cgggcggcac
caaaaccttt ccgatttatt ttcgcacctt tccgcatcat taa.

[0102] As stated herein, the term “GIPR polypeptide” encompasses naturally occurring GIPR polypeptide sequences, e.g., human amino acid sequences SEQ ID NOs: 3141, 3143 or 3145. The term “GIPR polypeptide,” however, also encompasses polypeptides comprising an amino acid sequence that differs from the amino acid sequence of a naturally occurring GIPR polypeptide sequence, e.g., SEQ ID NOs: 3141, 3143 or 3145, by one or more amino acids, such that the sequence is at least 85% identical to SEQ ID NOs: 3141, 3143 or 3145. GIPR polypeptides can be generated by introducing one or more amino acid substitutions, either conservative or non-conservative and using naturally or non-naturally occurring amino acids, at particular positions of the GIPR polypeptide.

[0103] A “conservative amino acid substitution” can involve a substitution of a native amino acid residue (i.e., a residue found in a given position of the wild-type GIPR polypeptide sequence) with a nonnative residue (i.e., a residue that is not found in a given position of the wild-type GIPR polypeptide sequence) such that there is little or no effect on the polarity or charge of the amino acid residue at that position. Conservative amino acid substitutions also encompass non-naturally occurring amino acid residues that are typically incorporated by chemical peptide synthesis rather than by synthesis in biological systems. These include peptidomimetics, and other reversed or inverted forms of amino acid moieties.

[0104] Naturally occurring residues can be divided into classes based on common side chain properties:

[0105] (1) hydrophobic: norleucine, Met, Ala, Val, Leu, Ile;

[0106] (2) neutral hydrophilic: Cys, Ser, Thr;

[0107] (3) acidic: Asp, Glu;

[0108] (4) basic: Asn, Gln, His, Lys, Arg;

[0109] (5) residues that influence chain orientation: Gly, Pro; and

[0110] (6) aromatic: Trp, Tyr, Phe.

[0111] Additional groups of amino acids can also be formulated using the principles described in, e.g., Creighton (1984) PROTEINS: STRUCTURE AND MOLECULAR PROPERTIES (2d Ed. 1993), W.H. Freeman and Company. In some instances it can be useful to further characterize substitutions based on two or more of such features (e.g., substitution with a “small polar” residue, such as a Thr residue, can represent a highly conservative substitution in an appropriate context).

[0112] Conservative substitutions can involve the exchange of a member of one of these classes for another member of the same class. Non-conservative substitutions can involve the exchange of a member of one of these classes for a member from another class.

[0113] Synthetic, rare, or modified amino acid residues having known similar physiochemical properties to those of an above-described grouping can be used as a “conservative” substitute for a particular amino acid residue in a sequence. For example, a D-Arg residue may serve as a substitute for a typical L-Arg residue. It also can be the case that a particular substitution can be described in terms of two or more of the above described classes (e.g., a substitution with a small and hydrophobic residue means substituting one amino acid with a residue(s) that is found in both of the above-described classes or other synthetic, rare, or modified residues that are known in the art to have similar physiochemical properties to such residues meeting both definitions).

[0114] Nucleic acid sequences encoding a GIPR polypeptide provided herein, including those degenerate to SEQ ID NOs: 3141, 3143 or 3145, and those encoding polypeptide variants of SEQ ID NOs: 3141, 3143 or 3145 form other aspects of the instant disclosure.

[0115] In order to express the GIPR nucleic acid sequences provided herein, the appropriate coding sequences, e.g., SEQ ID NOs: 3141, 3143 or 3145, can be cloned into a suitable vector and after introduction in a suitable host, the sequence can be expressed to produce the encoded polypeptide according to standard cloning and expression techniques, which are known in the art (e.g., as described in Sambrook, J., Fritsh, E. F., and Maniatis, T. Molecular Cloning: A Laboratory Manual 2nd, ed., Cold Spring Harbor Laboratory, Cold Spring Harbor Laboratory Press, Cold Spring Harbor, N.Y., 1989). The invention also relates to such vectors comprising a nucleic acid sequence according to the invention.

[0116] A “vector” refers to a delivery vehicle that (a) promotes the expression of a polypeptide-encoding nucleic acid sequence; (b) promotes the production of the polypeptide therefrom; (c) promotes the transfection/transformation of target cells therewith; (d) promotes the replication of the nucleic acid sequence; (e) promotes stability of the nucleic acid; (f) promotes detection of the nucleic acid and/or transformed/transfected cells; and/or (g) otherwise imparts advantageous biological and/or physiochemical function to the polypeptide-encoding nucleic acid. A vector can be any suitable vector, including chromosomal, non-chromosomal, and synthetic nucleic acid vectors (a nucleic acid sequence comprising a suitable set of expression control elements). Examples of such vectors include derivatives of SV40, bacterial plasmids, phage DNA, baculovirus, yeast plasmids, vectors derived from combinations of plasmids and phage DNA, and viral nucleic acid (RNA or DNA) vectors.

[0117] A recombinant expression vector can be designed for expression of a GIPR protein in prokaryotic (e.g., E. coli) or eukaryotic cells (e.g., insect cells, using baculovirus expression vectors, yeast cells, or mammalian cells). In one embodiment the host cell is a mammalian, non-human host cell. Representative host cells include those hosts typically used for cloning and expression, including Escherichia coli strains TOP10F′, TOP10, DH10B, DH5a, HB101, W3110, BL21(DE3) and BL21 (DE3)pLysS, BLUESCRIPT (Stratagene), mammalian cell lines CHO, CHO-KI, HEK293, 293-EBNA pIN vectors (Van Heeke & Schuster, J. Biol. Chem. 264: 5503-5509 (1989); pET vectors (Novagen, Madison Wis.). Alternatively, the recombinant expression vector can be transcribed and translated in vitro, for example using T7 promoter regulatory sequences and T7 polymerase and an in vitro translation system. Preferably, the vector contains a promoter upstream of the cloning site containing the nucleic acid sequence encoding the polypeptide. Examples of promoters, which can be switched on and off, include the lac promoter, the T7 promoter, the trc promoter, the tac promoter and the trp promoter.

[0118] Thus, provided herein are vectors comprising a nucleic acid sequence encoding GIPR that facilitate the expression of recombinant GIPR. In various embodiments, the vectors comprise an operably linked nucleotide sequence which regulates the expression of GIPR. A vector can comprise or be associated with any suitable promoter, enhancer, and other expression-facilitating elements. Examples of such elements include strong expression promoters (e.g., a human CMV IE promoter/enhancer, an RSV promoter, SV40 promoter, SL3-3 promoter, MMTV promoter, or HIV LTR promoter, EFIalpha promoter, CAG promoter), effective poly (A) termination sequences, an origin of replication for plasmid product in E. coli, an antibiotic resistance gene as a selectable marker, and/or a convenient cloning site (e.g., a polylinker). Vectors also can comprise an inducible promoter as opposed to a constitutive promoter such as CMV IE. In one aspect, a nucleic acid comprising a sequence encoding a GIPR polypeptide which is operatively linked to a tissue specific promoter which promotes expression of the sequence in a tissue relevant to cortisol secretion or production is provided.

[0119] In another aspect of the instant disclosure, host cells comprising the GIPR nucleic acids and vectors disclosed herein are provided. In various embodiments, the vector or nucleic acid is integrated into the host cell genome, which in other embodiments the vector or nucleic acid is extra-chromosomal.

[0120] Recombinant cells, such as yeast, bacterial (e.g., E. coli), and mammalian cells (e.g., immortalized mammalian cells) comprising such a nucleic acid, vector, or combinations of either or both thereof are provided. In various embodiments cells comprising a non-integrated nucleic acid, such as a plasmid, cosmid, phagemid, or linear expression element, which comprises a sequence coding for expression of a GIPR polypeptide, are provided.

[0121] A vector comprising a nucleic acid sequence encoding a GIPR polypeptide provided herein can be introduced into a host cell by transformation or by transfection. Methods of transforming a cell with an expression vector are well known.

[0122] A GIPR-encoding nucleic acid can be positioned in and/or delivered to a host cell or host animal via a viral vector. Any suitable viral vector can be used in this capacity. A viral vector can comprise any number of viral polynucleotides, alone or in combination with one or more viral proteins, which facilitate delivery, replication, and/or expression of the nucleic acid of the invention in a desired host cell. The viral vector can be a polynucleotide comprising all or part of a viral genome, a viral protein/nucleic acid conjugate, a virus-like particle (VLP), or an intact virus particle comprising viral nucleic acids and a GIPR polypeptide-encoding nucleic acid. A viral particle viral vector can comprise a wild-type viral particle or a modified viral particle. The viral vector can be a vector which requires the presence of another vector or wild-type virus for replication and/or expression (e.g., a viral vector can be a helper-dependent virus), such as an adenoviral vector amplicon. Typically, such viral vectors consist of a wild-type viral particle, or a viral particle modified in its protein and/or nucleic acid content to increase transgene capacity or aid in transfection and/or expression of the nucleic acid (examples of such vectors include the herpes virus/AAV amplicons). Typically, a viral vector is similar to and/or derived from a virus that normally infects humans. Suitable viral vector particles in this respect, include, for example, adenoviral vector particles (including any virus of or derived from a virus of the adenoviridae), adeno-associated viral vector particles (AAV vector particles) or other parvoviruses and parvoviral vector particles, papillomaviral vector particles, flaviviral vectors, alphaviral vectors, herpes viral vectors, pox virus vectors, retroviral vectors, including lentiviral vectors.

[0123] A GIPR polypeptide expressed as described herein can be isolated using standard protein purification methods. A GIPR polypeptide can be isolated from a cell in which is it naturally expressed or it can be isolated from a cell that has been engineered to express GIPR, for example a cell that does not naturally express GIPR.

[0124] Protein purification methods that can be employed to isolate a GIPR polypeptide, as well as associated materials and reagents, are known in the art. Additional purification methods that may be useful for isolating a GIPR polypeptide can be found in references such as Bootcov M R, 1997, Proc. Natl. Acad. Sci. USA 94:11514-9, Fairlie W D, 2000, Gene 254: 67-76.

[0125] Antagonist antigen binding proteins that bind GIPR, including human GIPR (hGIPR) are provided herein. In one embodiment, the human GIPR has the sequence as such as set forth in SEQ ID NO: 3141. In another embodiment, the human GIPR has the sequence as such set forth in SEQ ID NO: 3143. In another embodiment, the human GIPR has the sequence as such set forth in SEQ ID NO: 3145.

[0126] The antigen binding proteins provided are polypeptides into which one or more complementary determining regions (CDRs), as described herein, are embedded and/or joined. In some antigen binding proteins, the CDRs are embedded into a “framework” region, which orients the CDR(s) such that the proper antigen binding properties of the CDR(s) are achieved. Certain antigen binding proteins described herein are antibodies or are derived from antibodies. In other antigen binding proteins, the CDR sequences are embedded in a different type of protein scaffold. The various structures are further described below.

[0127] The antigen binding proteins that are disclosed herein have a variety of utilities. The antigen binding proteins, for instance, are useful in specific binding assays, affinity purification of GIPR, and in screening assays to identify other antagonists of GIPR activity. Other uses for the antigen binding proteins include, for example, diagnosis of GIPR-associated diseases or conditions and screening assays to determine the presence or absence of GIPR. Given that the antigen binding proteins that are provided are antagonists, the GIPR antigen binding proteins have value in therapeutic methods in which it is useful to reduce cortisol levels. Accordingly, the antigen binding proteins have utility in the treatment and prevention of Cushing's syndrome.

[0128] A variety of selective binding agents useful for modulating the activity of GIPR are provided. These agents include, for instance, antigen binding proteins that contain an antigen binding domain (e.g., scFvs, domain antibodies, and polypeptides with an antigen binding region) and specifically bind to a GIPR polypeptide, in particular human GIPR. Some of the agents, for example, are useful in enhancing the activity of GIPR, and can activate one or more activities associated with GIPR.

[0129] In general the antigen binding proteins that are provided typically comprise one or more CDRs as described herein (e.g., 1, 2, 3, 4, 5 or 6). In some instances, the antigen binding protein comprises (a) a polypeptide structure and (b) one or more CDRs that are inserted into and/or joined to the polypeptide structure. The polypeptide structure can take a variety of different forms. For example, it can be, or comprise, the framework of a naturally occurring antibody, or fragment or variant thereof, or may be completely synthetic in nature. Examples of various polypeptide structures are further described below.

[0130] In certain embodiments, the polypeptide structure of the antigen binding proteins is an antibody or is derived from an antibody. Accordingly, examples of certain antigen binding proteins that are provided include, but are not limited to, monoclonal antibodies, bispecific antibodies, minibodies, domain antibodies such as Nanobodies®, synthetic antibodies (sometimes referred to herein as “antibody mimetics”), chimeric antibodies, humanized antibodies, human antibodies, antibody fusions, and portions or fragments of each, respectively. In some instances, the antigen binding protein is an immunological fragment of a complete antibody (e.g., a Fab, a Fab′, a F(ab′)2). In other instances the antigen binding protein is a scFv that uses CDRs from an antibody of the present invention.

[0131] The antigen binding proteins as provided herein specifically bind to a human GIPR. In a specific embodiment, the antigen binding protein specifically binds to human GIPR comprising or consisting of the amino acid sequence of SEQ ID NO: 3141. In a specific embodiment, the antigen binding protein specifically binds to human GIPR comprising or consisting of the amino acid sequence of SEQ ID NO: 3143. In a specific embodiment, the antigen binding protein specifically binds to human GIPR comprising or consisting of the amino acid sequence of SEQ ID NO: 3145.

[0132] The antigen binding proteins that are provided are antagonists and typically have the following characteristics: ability to decrease cortisol levels resulting from GIP stimulation (endogenous or exogenous).

[0133] In one embodiment, a GIPR antigen binding protein has one or more of the following activities:

[0134] (a) binds human GIPR such that KD is ≤200 nM, is ≤150 nM, is ≤100 nM, is ≤50 nM, is ≤10 nM, is ≤5 nM, is ≤2 nM, or is ≤1 nM, e.g., as measured via a surface plasma resonance or kinetic exclusion assay technique.

[0135] (b) has a half-life in human serum of at least 3 days;

[0136] Some antigen binding proteins that are provided have an on-rate (ka) for GIPR of at least 10⁴/M×seconds, at least 10⁵/M×seconds, or at least 10⁶/M×seconds as measured, for instance, as described below. Certain antigen binding proteins that are provided have a slow dissociation rate or off-rate. Some antigen binding proteins, for instance, have a kd (off-rate) of 1×10⁻² s⁻¹, or 1×10⁻³ s⁻¹, or 1×10⁻⁴ s⁻¹, or 1×10⁻⁵ s⁻¹. In certain embodiments, the antigen binding protein has a KD (equilibrium binding affinity) of less than 25 pM, 50 pM, 100 pM, 500 pM, 1 nM, 5 nM, 10 nM, 25 nM or 50 nM.

[0137] In another aspect, an antigen-binding protein is provided having a half-life of at least one day in vitro or in vivo (e.g., when administered to a human subject). In one embodiment, the antigen binding protein has a half-life of at least three days. In various other embodiments, the antigen binding protein has a half-life of 4, 5, 6, 7, 8, 9, 10, 15, 20, 25, 30, 40, 50, or 60 days or longer. In another embodiment, the antigen binding protein is derivatized or modified such that it has a longer half-life as compared to the underivatized or unmodified antibody. In another embodiment, the antigen binding protein contains point mutations to increase serum half-life. Further details regarding such mutant and derivatized forms are provided below.

[0138] Some of the antigen binding proteins that are provided have the structure typically associated with naturally occurring antibodies. The structural units of these antibodies typically comprise one or more tetramers, each composed of two identical couplets of polypeptide chains, though some species of mammals also produce antibodies having only a single heavy chain. In a typical antibody, each pair or couplet includes one full-length “light” chain (in certain embodiments, about 25 kDa) and one full-length “heavy” chain (in certain embodiments, about 50-70 kDa). Each individual immunoglobulin chain is composed of several “immunoglobulin domains”, each consisting of roughly 90 to 110 amino acids and expressing a characteristic folding pattern. These domains are the basic units of which antibody polypeptides are composed. The amino-terminal portion of each chain typically includes a variable domain that is responsible for antigen recognition. The carboxy-terminal portion is more conserved evolutionarily than the other end of the chain and is referred to as the “constant region” or “C region”. Human light chains generally are classified as kappa and lambda light chains, and each of these contains one variable domain and one constant domain. Heavy chains are typically classified as mu, delta, gamma, alpha, or epsilon chains, and these define the antibody's isotype as IgM, IgD, IgG, IgA, and IgE, respectively. IgG has several subtypes, including, but not limited to, IgG1, IgG2, IgG3, and IgG4. IgM subtypes include IgM, and IgM2. IgA subtypes include IgA1 and IgA2. In humans, the IgA and IgD isotypes contain four heavy chains and four light chains; the IgG and IgE isotypes contain two heavy chains and two light chains; and the IgM isotype contains five heavy chains and five light chains. The heavy chain C region typically comprises one or more domains that may be responsible for effector function. The number of heavy chain constant region domains will depend on the isotype. IgG heavy chains, for example, each contain three C region domains known as CH1, CH2 and CH3. The antibodies that are provided can have any of these isotypes and subtypes. In certain embodiments, the GIPR antibody is of the IgG1, IgG2, or IgG4 subtype. The terms “GIPR antibody” and “anti-GIPR antibody” are used interchangeably throughout this application and figures. Both terms refer to an antibody that binds to GIPR.

[0139] In full-length light and heavy chains, the variable and constant regions are joined by a “J” region of about twelve or more amino acids, with the heavy chain also including a “D” region of about ten more amino acids. See, e.g. Fundamental Immunology, 2nd ed., Ch. 7 (Paul, W., ed.) 1989, New York: Raven Press (hereby incorporated by reference in its entirety for all purposes). The variable regions of each light/heavy chain pair typically form the antigen binding site.

[0140] For the antibodies provided herein, the variable regions of immunoglobulin chains generally exhibit the same overall structure, comprising relatively conserved framework regions (FR) joined by three hypervariable regions, more often called “complementarity determining regions” or CDRs. The CDRs from the two chains of each heavy chain/light chain pair mentioned above typically are aligned by the framework regions to form a structure that binds specifically with a specific epitope on GIPR. From N-terminal to C-terminal, naturally-occurring light and heavy chain variable regions both typically conform with the following order of these elements: FR1, CDR1, FR2, CDR2, FR3, CDR3 and FR4. A numbering system has been devised for assigning numbers to amino acids that occupy positions in each of these domains. This numbering system is defined in Kabat Sequences of Proteins of Immunological Interest (1987 and 1991, NIH, Bethesda, Md.), or Chothia & Lesk, 1987, J. Mol. Biol. 196:901-917; Chothia et al., 1989, Nature 342:878-883.

[0141] The sequence information for specific antibodies prepared and identified as described in the Examples below is summarized in TABLES 1 and 6. Thus, in an embodiment, an antigen binding protein is an antibody with the CDR, variable domain and light and heavy chain sequences as specified in one of the rows of TABLE 1 or TABLE 6.

[0142] SEQ ID NOs have been assigned to variable light chain, variable heavy chain, light chain, heavy chain, CDRL1, CDRL2, CDRL3, CDRH1, CDRH2, and CDRH3 sequences of the antibodies and fragments thereof of the present invention and are shown in TABLE 1 and TABLE 6. SEQ ID NOs have also been assigned to polynucleotides encoding the variable light chain, variable heavy chain, light chain, heavy chain, CDRL1, CDRL2, CDRL3, CDRH1, CDRH2, and CDRH3 sequences of the antibodies and fragments thereof of the present invention and are shown in TABLE 2 and TABLE 7. The antigen binding proteins of the present invention can be identified by SEQ ID NO, but also by construct name (e.g., 2C2.005) or identifier number (e.g., iPS:336175). The antigen binding proteins identified in Tables 1-10 below can be grouped into families based on construct name. For example, the “4B1 family” includes the constructs 4B1, 4B1.010, 4B1.011, 4B1.012, 4B1.013, 4B1.014, 4B1.015, and 4B1.016.

[0143] The various light chain and heavy chain variable regions provided herein are depicted in TABLE 3 and TABLE 8. Each of these variable regions may be attached to a heavy or light chain constant regions to form a complete antibody heavy and light chain, respectively. Furthermore, each of the so generated heavy and light chain sequences may be combined to form a complete antibody structure.

Lengthy table referenced here
US20220403038A1-20221222-T00001
Please refer to the end of the specification for access instructions.

Lengthy table referenced here
US20220403038A1-20221222-T00002
Please refer to the end of the specification for access instructions.

Lengthy table referenced here
US20220403038A1-20221222-T00003
Please refer to the end of the specification for access instructions.

Lengthy table referenced here
US20220403038A1-20221222-T00004
Please refer to the end of the specification for access instructions.

Lengthy table referenced here
US20220403038A1-20221222-T00005
Please refer to the end of the specification for access instructions.

Lengthy table referenced here
US20220403038A1-20221222-T00006
Please refer to the end of the specification for access instructions.

Lengthy table referenced here
US20220403038A1-20221222-T00007
Please refer to the end of the specification for access instructions.

Lengthy table referenced here
US20220403038A1-20221222-T00008
Please refer to the end of the specification for access instructions.

Lengthy table referenced here
US20220403038A1-20221222-T00009
Please refer to the end of the specification for access instructions.

Lengthy table referenced here
US20220403038A1-20221222-T00010
Please refer to the end of the specification for access instructions.

[0144] In one embodiment the antibody or fragment thereof comprises a light chain variable region comprising a sequence selected from the group consisting of SEQ ID NOs: 1-157. In one embodiment the antibody or fragment thereof comprises a heavy chain variable region comprising a sequence selected from the group consisting of SEQ ID NOs: 158-314. In one embodiment the antibody or fragment thereof comprises a light chain variable region comprising a sequence selected from the group consisting of SEQ ID NOs: 1-157 and a heavy chain variable region comprising a sequence selected from the group consisting of SEQ ID NOs: 158-314. In one embodiment the antibody or fragment thereof comprises a combination of light chain variable region and a heavy chain variable region selected from the group consisting of a light chain variable region comprising SEQ ID NO: 1 and a heavy chain variable region comprising SEQ ID NO: 158; a light chain variable region comprising SEQ ID NO: 2 and a heavy chain variable region comprising SEQ ID NO: 159; a light chain variable region comprising SEQ ID NO: 3 and a heavy chain variable region comprising SEQ ID NO: 160; a light chain variable region comprising SEQ ID NO: 4 and a heavy chain variable region comprising SEQ ID NO: 161; a light chain variable region comprising SEQ ID NO: 5 and a heavy chain variable region comprising SEQ ID NO: 162; a light chain variable region comprising SEQ ID NO: 6 and a heavy chain variable region comprising SEQ ID NO: 163; a light chain variable region comprising SEQ ID NO: 7 and a heavy chain variable region comprising SEQ ID NO: 164; a light chain variable region comprising SEQ ID NO: 8 and a heavy chain variable region comprising SEQ ID NO: 165; a light chain variable region comprising SEQ ID NO: 9 and a heavy chain variable region comprising SEQ ID NO: 166; a light chain variable region comprising SEQ ID NO: 10 and a heavy chain variable region comprising SEQ ID NO: 167; a light chain variable region comprising SEQ ID NO: 11 and a heavy chain variable region comprising SEQ ID NO: 168; a light chain variable region comprising SEQ ID NO: 12 and a heavy chain variable region comprising SEQ ID NO: 169; a light chain variable region comprising SEQ ID NO: 13 and a heavy chain variable region comprising SEQ ID NO: 170; a light chain variable region comprising SEQ ID NO: 14 and a heavy chain variable region comprising SEQ ID NO: 171; a light chain variable region comprising SEQ ID NO: 15 and a heavy chain variable region comprising SEQ ID NO: 172; a light chain variable region comprising SEQ ID NO: 16 and a heavy chain variable region comprising SEQ ID NO: 173; a light chain variable region comprising SEQ ID NO: 17 and a heavy chain variable region comprising SEQ ID NO: 174; a light chain variable region comprising SEQ ID NO: 18 and a heavy chain variable region comprising SEQ ID NO: 175; a light chain variable region comprising SEQ ID NO: 19 and a heavy chain variable region comprising SEQ ID NO: 176; a light chain variable region comprising SEQ ID NO: 20 and a heavy chain variable region comprising SEQ ID NO: 177; a light chain variable region comprising SEQ ID NO: 21 and a heavy chain variable region comprising SEQ ID NO: 178; a light chain variable region comprising SEQ ID NO: 22 and a heavy chain variable region comprising SEQ ID NO: 179; a light chain variable region comprising SEQ ID NO: 23 and a heavy chain variable region comprising SEQ ID NO: 180; a light chain variable region comprising SEQ ID NO: 24 and a heavy chain variable region comprising SEQ ID NO: 181; a light chain variable region comprising SEQ ID NO: 25 and a heavy chain variable region comprising SEQ ID NO: 182; a light chain variable region comprising SEQ ID NO: 26 and a heavy chain variable region comprising SEQ ID NO: 183; a light chain variable region comprising SEQ ID NO: 27 and a heavy chain variable region comprising SEQ ID NO: 184; a light chain variable region comprising SEQ ID NO: 28 and a heavy chain variable region comprising SEQ ID NO: 185; a light chain variable region comprising SEQ ID NO: 29 and a heavy chain variable region comprising SEQ ID NO: 186; a light chain variable region comprising SEQ ID NO: 30 and a heavy chain variable region comprising SEQ ID NO: 187; a light chain variable region comprising SEQ ID NO: 31 and a heavy chain variable region comprising SEQ ID NO: 188; a light chain variable region comprising SEQ ID NO: 32 and a heavy chain variable region comprising SEQ ID NO: 189; a light chain variable region comprising SEQ ID NO: 33 and a heavy chain variable region comprising SEQ ID NO: 190; a light chain variable region comprising SEQ ID NO: 34 and a heavy chain variable region comprising SEQ ID NO: 191; a light chain variable region comprising SEQ ID NO: 35 and a heavy chain variable region comprising SEQ ID NO: 192; a light chain variable region comprising SEQ ID NO: 36 and a heavy chain variable region comprising SEQ ID NO: 193; a light chain variable region comprising SEQ ID NO: 37 and a heavy chain variable region comprising SEQ ID NO: 194; a light chain variable region comprising SEQ ID NO: 38 and a heavy chain variable region comprising SEQ ID NO: 195; a light chain variable region comprising SEQ ID NO: 39 and a heavy chain variable region comprising SEQ ID NO: 196; a light chain variable region comprising SEQ ID NO: 40 and a heavy chain variable region comprising SEQ ID NO: 197; a light chain variable region comprising SEQ ID NO: 41 and a heavy chain variable region comprising SEQ ID NO: 198; a light chain variable region comprising SEQ ID NO: 42 and a heavy chain variable region comprising SEQ ID NO: 199; a light chain variable region comprising SEQ ID NO: 43 and a heavy chain variable region comprising SEQ ID NO: 200; a light chain variable region comprising SEQ ID NO: 44 and a heavy chain variable region comprising SEQ ID NO: 201; a light chain variable region comprising SEQ ID NO: 45 and a heavy chain variable region comprising SEQ ID NO: 202; a light chain variable region comprising SEQ ID NO: 46 and a heavy chain variable region comprising SEQ ID NO: 203; a light chain variable region comprising SEQ ID NO: 47 and a heavy chain variable region comprising SEQ ID NO: 204; a light chain variable region comprising SEQ ID NO: 48 and a heavy chain variable region comprising SEQ ID NO: 205; a light chain variable region comprising SEQ ID NO: 49 and a heavy chain variable region comprising SEQ ID NO: 206; a light chain variable region comprising SEQ ID NO: 50 and a heavy chain variable region comprising SEQ ID NO: 207; a light chain variable region comprising SEQ ID NO: 51 and a heavy chain variable region comprising SEQ ID NO: 208; a light chain variable region comprising SEQ ID NO: 52 and a heavy chain variable region comprising SEQ ID NO: 209; a light chain variable region comprising SEQ ID NO: 53 and a heavy chain variable region comprising SEQ ID NO: 210; a light chain variable region comprising SEQ ID NO: 54 and a heavy chain variable region comprising SEQ ID NO: 211; a light chain variable region comprising SEQ ID NO: 55 and a heavy chain variable region comprising SEQ ID NO: 212; a light chain variable region comprising SEQ ID NO: 56 and a heavy chain variable region comprising SEQ ID NO: 213; a light chain variable region comprising SEQ ID NO: 57 and a heavy chain variable region comprising SEQ ID NO: 214; a light chain variable region comprising SEQ ID NO: 58 and a heavy chain variable region comprising SEQ ID NO: 215; a light chain variable region comprising SEQ ID NO: 59 and a heavy chain variable region comprising SEQ ID NO: 216; a light chain variable region comprising SEQ ID NO: 60 and a heavy chain variable region comprising SEQ ID NO: 217; a light chain variable region comprising SEQ ID NO: 61 and a heavy chain variable region comprising SEQ ID NO: 218; a light chain variable region comprising SEQ ID NO: 62 and a heavy chain variable region comprising SEQ ID NO: 219; a light chain variable region comprising SEQ ID NO: 63 and a heavy chain variable region comprising SEQ ID NO: 220; a light chain variable region comprising SEQ ID NO: 64 and a heavy chain variable region comprising SEQ ID NO: 221; a light chain variable region comprising SEQ ID NO: 65 and a heavy chain variable region comprising SEQ ID NO: 222; a light chain variable region comprising SEQ ID NO: 66 and a heavy chain variable region comprising SEQ ID NO: 223; a light chain variable region comprising SEQ ID NO: 67 and a heavy chain variable region comprising SEQ ID NO: 224; a light chain variable region comprising SEQ ID NO: 68 and a heavy chain variable region comprising SEQ ID NO: 225; a light chain variable region comprising SEQ ID NO: 69 and a heavy chain variable region comprising SEQ ID NO: 226; a light chain variable region comprising SEQ ID NO: 70 and a heavy chain variable region comprising SEQ ID NO: 227; a light chain variable region comprising SEQ ID NO: 71 and a heavy chain variable region comprising SEQ ID NO: 228; a light chain variable region comprising SEQ ID NO: 72 and a heavy chain variable region comprising SEQ ID NO: 229; a light chain variable region comprising SEQ ID NO: 73 and a heavy chain variable region comprising SEQ ID NO: 230; a light chain variable region comprising SEQ ID NO: 74 and a heavy chain variable region comprising SEQ ID NO: 231; a light chain variable region comprising SEQ ID NO: 75 and a heavy chain variable region comprising SEQ ID NO: 232; a light chain variable region comprising SEQ ID NO: 76 and a heavy chain variable region comprising SEQ ID NO: 233; a light chain variable region comprising SEQ ID NO: 77 and a heavy chain variable region comprising SEQ ID NO: 234; a light chain variable region comprising SEQ ID NO: 78 and a heavy chain variable region comprising SEQ ID NO: 235; a light chain variable region comprising SEQ ID NO: 79 and a heavy chain variable region comprising SEQ ID NO: 236; a light chain variable region comprising SEQ ID NO: 80 and a heavy chain variable region comprising SEQ ID NO: 237; a light chain variable region comprising SEQ ID NO: 81 and a heavy chain variable region comprising SEQ ID NO: 238; a light chain variable region comprising SEQ ID NO: 82 and a heavy chain variable region comprising SEQ ID NO: 239; a light chain variable region comprising SEQ ID NO: 83 and a heavy chain variable region comprising SEQ ID NO: 240; a light chain variable region comprising SEQ ID NO: 84 and a heavy chain variable region comprising SEQ ID NO: 241; a light chain variable region comprising SEQ ID NO: 85 and a heavy chain variable region comprising SEQ ID NO: 242; a light chain variable region comprising SEQ ID NO: 86 and a heavy chain variable region comprising SEQ ID NO: 243; a light chain variable region comprising SEQ ID NO: 87 and a heavy chain variable region comprising SEQ ID NO: 244; a light chain variable region comprising SEQ ID NO: 88 and a heavy chain variable region comprising SEQ ID NO: 245; a light chain variable region comprising SEQ ID NO: 89 and a heavy chain variable region comprising SEQ ID NO: 246; a light chain variable region comprising SEQ ID NO: 90 and a heavy chain variable region comprising SEQ ID NO: 247; a light chain variable region comprising SEQ ID NO: 91 and a heavy chain variable region comprising SEQ ID NO: 248; a light chain variable region comprising SEQ ID NO: 92 and a heavy chain variable region comprising SEQ ID NO: 249; a light chain variable region comprising SEQ ID NO: 93 and a heavy chain variable region comprising SEQ ID NO: 250; a light chain variable region comprising SEQ ID NO: 94 and a heavy chain variable region comprising SEQ ID NO: 251; a light chain variable region comprising SEQ ID NO: 95 and a heavy chain variable region comprising SEQ ID NO: 252; a light chain variable region comprising SEQ ID NO: 96 and a heavy chain variable region comprising SEQ ID NO: 253; a light chain variable region comprising SEQ ID NO: 97 and a heavy chain variable region comprising SEQ ID NO: 254; a light chain variable region comprising SEQ ID NO: 98 and a heavy chain variable region comprising SEQ ID NO: 255; a light chain variable region comprising SEQ ID NO: 99 and a heavy chain variable region comprising SEQ ID NO: 256; a light chain variable region comprising SEQ ID NO: 100 and a heavy chain variable region comprising SEQ ID NO: 257; a light chain variable region comprising SEQ ID NO: 101 and a heavy chain variable region comprising SEQ ID NO: 258; a light chain variable region comprising SEQ ID NO: 102 and a heavy chain variable region comprising SEQ ID NO: 259; a light chain variable region comprising SEQ ID NO: 103 and a heavy chain variable region comprising SEQ ID NO: 260; a light chain variable region comprising SEQ ID NO: 104 and a heavy chain variable region comprising SEQ ID NO: 261; a light chain variable region comprising SEQ ID NO: 105 and a heavy chain variable region comprising SEQ ID NO: 262; a light chain variable region comprising SEQ ID NO: 106 and a heavy chain variable region comprising SEQ ID NO: 263; a light chain variable region comprising SEQ ID NO: 107 and a heavy chain variable region comprising SEQ ID NO: 264; a light chain variable region comprising SEQ ID NO: 108 and a heavy chain variable region comprising SEQ ID NO: 265; a light chain variable region comprising SEQ ID NO: 109 and a heavy chain variable region comprising SEQ ID NO: 266; a light chain variable region comprising SEQ ID NO: 110 and a heavy chain variable region comprising SEQ ID NO: 267; a light chain variable region comprising SEQ ID NO: 111 and a heavy chain variable region comprising SEQ ID NO: 268; a light chain variable region comprising SEQ ID NO: 112 and a heavy chain variable region comprising SEQ ID NO: 269; a light chain variable region comprising SEQ ID NO: 113 and a heavy chain variable region comprising SEQ ID NO: 270; a light chain variable region comprising SEQ ID NO: 114 and a heavy chain variable region comprising SEQ ID NO: 271; a light chain variable region comprising SEQ ID NO: 115 and a heavy chain variable region comprising SEQ ID NO: 272; a light chain variable region comprising SEQ ID NO: 116 and a heavy chain variable region comprising SEQ ID NO: 273; a light chain variable region comprising SEQ ID NO: 117 and a heavy chain variable region comprising SEQ ID NO: 274; a light chain variable region comprising SEQ ID NO: 118 and a heavy chain variable region comprising SEQ ID NO: 275; a light chain variable region comprising SEQ ID NO: 119 and a heavy chain variable region comprising SEQ ID NO: 276; a light chain variable region comprising SEQ ID NO: 120 and a heavy chain variable region comprising SEQ ID NO: 277; a light chain variable region comprising SEQ ID NO: 121 and a heavy chain variable region comprising SEQ ID NO: 278; a light chain variable region comprising SEQ ID NO: 122 and a heavy chain variable region comprising SEQ ID NO: 279; a light chain variable region comprising SEQ ID NO: 123 and a heavy chain variable region comprising SEQ ID NO: 280; a light chain variable region comprising SEQ ID NO: 124 and a heavy chain variable region comprising SEQ ID NO: 281; a light chain variable region comprising SEQ ID NO: 125 and a heavy chain variable region comprising SEQ ID NO: 282; a light chain variable region comprising SEQ ID NO: 126 and a heavy chain variable region comprising SEQ ID NO: 283; a light chain variable region comprising SEQ ID NO: 127 and a heavy chain variable region comprising SEQ ID NO: 284; a light chain variable region comprising SEQ ID NO: 128 and a heavy chain variable region comprising SEQ ID NO: 285; a light chain variable region comprising SEQ ID NO: 129 and a heavy chain variable region comprising SEQ ID NO: 286; a light chain variable region comprising SEQ ID NO: 130 and a heavy chain variable region comprising SEQ ID NO: 287; a light chain variable region comprising SEQ ID NO: 131 and a heavy chain variable region comprising SEQ ID NO: 288; a light chain variable region comprising SEQ ID NO: 132 and a heavy chain variable region comprising SEQ ID NO: 289; a light chain variable region comprising SEQ ID NO: 133 and a heavy chain variable region comprising SEQ ID NO: 290; a light chain variable region comprising SEQ ID NO: 134 and a heavy chain variable region comprising SEQ ID NO: 291; a light chain variable region comprising SEQ ID NO: 135 and a heavy chain variable region comprising SEQ ID NO: 292; a light chain variable region comprising SEQ ID NO: 136 and a heavy chain variable region comprising SEQ ID NO: 293; a light chain variable region comprising SEQ ID NO: 137 and a heavy chain variable region comprising SEQ ID NO: 294; a light chain variable region comprising SEQ ID NO: 138 and a heavy chain variable region comprising SEQ ID NO: 295; a light chain variable region comprising SEQ ID NO: 139 and a heavy chain variable region comprising SEQ ID NO: 296; a light chain variable region comprising SEQ ID NO: 140 and a heavy chain variable region comprising SEQ ID NO: 297; a light chain variable region comprising SEQ ID NO: 141 and a heavy chain variable region comprising SEQ ID NO: 298; a light chain variable region comprising SEQ ID NO: 142 and a heavy chain variable region comprising SEQ ID NO: 299; a light chain variable region comprising SEQ ID NO: 143 and a heavy chain variable region comprising SEQ ID NO: 300; a light chain variable region comprising SEQ ID NO: 144 and a heavy chain variable region comprising SEQ ID NO: 301; a light chain variable region comprising SEQ ID NO: 145 and a heavy chain variable region comprising SEQ ID NO: 302; a light chain variable region comprising SEQ ID NO: 146 and a heavy chain variable region comprising SEQ ID NO: 303; a light chain variable region comprising SEQ ID NO: 147 and a heavy chain variable region comprising SEQ ID NO: 304; a light chain variable region comprising SEQ ID NO: 148 and a heavy chain variable region comprising SEQ ID NO: 305; a light chain variable region comprising SEQ ID NO: 149 and a heavy chain variable region comprising SEQ ID NO: 306; a light chain variable region comprising SEQ ID NO: 150 and a heavy chain variable region comprising SEQ ID NO: 307; a light chain variable region comprising SEQ ID NO: 151 and a heavy chain variable region comprising SEQ ID NO: 308; a light chain variable region comprising SEQ ID NO: 152 and a heavy chain variable region comprising SEQ ID NO: 309; a light chain variable region comprising SEQ ID NO: 153 and a heavy chain variable region comprising SEQ ID NO: 310; a light chain variable region comprising SEQ ID NO: 154 and a heavy chain variable region comprising SEQ ID NO: 311; a light chain variable region comprising SEQ ID NO: 155 and a heavy chain variable region comprising SEQ ID NO: 312; a light chain variable region comprising SEQ ID NO: 156 and a heavy chain variable region comprising SEQ ID NO: 313; and a light chain variable region comprising SEQ ID NO: 157 and a heavy chain variable region comprising SEQ ID NO: 314.

[0145] In one embodiment the antibody or fragment thereof comprises a light chain variable region encoded by a polynucleotide sequence selected from the group consisting of SEQ ID NOs: 1571-1727. In one embodiment the antibody or fragment thereof comprises a heavy chain variable region encoded by a polynucleotide selected from the group consisting of SEQ ID NOs: 1728-1884. In one embodiment the antibody or fragment thereof comprises a light chain variable region encoded by a polynucleotide sequence selected from the group consisting of SEQ ID NOs: 1571-1727 and a heavy chain variable region encoded by a polynucleotide sequence selected from the group consisting of SEQ ID NOs: 1728-1884. In one embodiment the antibody or fragment thereof comprises a combination of light chain variable region and a heavy chain variable region selected from the group consisting of a light chain variable region encoded by a polynucleotide sequence comprising SEQ ID NO: 1571 and a heavy chain variable region encoded by a polynucleotide sequence comprising SEQ ID NO: 1728; a light chain variable region encoded by a polynucleotide sequence comprising SEQ ID NO: 1572 and a heavy chain variable region encoded by a polynucleotide sequence comprising SEQ ID NO: 1729; a light chain variable region encoded by a polynucleotide sequence comprising SEQ ID NO: 1573 and a heavy chain variable region encoded by a polynucleotide sequence comprising SEQ ID NO: 1730; a light chain variable region encoded by a polynucleotide sequence comprising SEQ ID NO: 1574 and a heavy chain variable region encoded by a polynucleotide sequence comprising SEQ ID NO: 1731; a light chain variable region encoded by a polynucleotide sequence comprising SEQ ID NO: 1575 and a heavy chain variable region encoded by a polynucleotide sequence comprising SEQ ID NO: 1732; a light chain variable region encoded by a polynucleotide sequence comprising SEQ ID NO: 1576 and a heavy chain variable region encoded by a polynucleotide sequence comprising SEQ ID NO: 1733; a light chain variable region encoded by a polynucleotide sequence comprising SEQ ID NO: 1577 and a heavy chain variable region encoded by a polynucleotide sequence comprising SEQ ID NO: 1734; a light chain variable region encoded by a polynucleotide sequence comprising SEQ ID NO: 1578 and a heavy chain variable region encoded by a polynucleotide sequence comprising SEQ ID NO: 1735; a light chain variable region encoded by a polynucleotide sequence comprising SEQ ID NO: 1579 and a heavy chain variable region encoded by a polynucleotide sequence comprising SEQ ID NO: 1736; a light chain variable region encoded by a polynucleotide sequence comprising SEQ ID NO: 1580 and a heavy chain variable region encoded by a polynucleotide sequence comprising SEQ ID NO: 1737; a light chain variable region encoded by a polynucleotide sequence comprising SEQ ID NO: 1581 and a heavy chain variable region encoded by a polynucleotide sequence comprising SEQ ID NO: 1738; a light chain variable region encoded by a polynucleotide sequence comprising SEQ ID NO: 1582 and a heavy chain variable region encoded by a polynucleotide sequence comprising SEQ ID NO: 1739; a light chain variable region encoded by a polynucleotide sequence comprising SEQ ID NO: 1583 and a heavy chain variable region encoded by a polynucleotide sequence comprising SEQ ID NO: 1740; a light chain variable region encoded by a polynucleotide sequence comprising SEQ ID NO: 1584 and a heavy chain variable region encoded by a polynucleotide sequence comprising SEQ ID NO: 1741; a light chain variable region encoded by a polynucleotide sequence comprising SEQ ID NO: 1585 and a heavy chain variable region encoded by a polynucleotide sequence comprising SEQ ID NO: 1742; a light chain variable region encoded by a polynucleotide sequence comprising SEQ ID NO: 1586 and a heavy chain variable region encoded by a polynucleotide sequence comprising SEQ ID NO: 1743; a light chain variable region encoded by a polynucleotide sequence comprising SEQ ID NO: 1587 and a heavy chain variable region encoded by a polynucleotide sequence comprising SEQ ID NO: 1744; a light chain variable region encoded by a polynucleotide sequence comprising SEQ ID NO: 1588 and a heavy chain variable region encoded by a polynucleotide sequence comprising SEQ ID NO: 1745; a light chain variable region encoded by a polynucleotide sequence comprising SEQ ID NO: 1589 and a heavy chain variable region encoded by a polynucleotide sequence comprising SEQ ID NO: 1746; a light chain variable region encoded by a polynucleotide sequence comprising SEQ ID NO: 1590 and a heavy chain variable region encoded by a polynucleotide sequence comprising SEQ ID NO: 1747; a light chain variable region encoded by a polynucleotide sequence comprising SEQ ID NO: 1591 and a heavy chain variable region encoded by a polynucleotide sequence comprising SEQ ID NO: 1748; a light chain variable region encoded by a polynucleotide sequence comprising SEQ ID NO: 1592 and a heavy chain variable region encoded by a polynucleotide sequence comprising SEQ ID NO: 1749; a light chain variable region encoded by a polynucleotide sequence comprising SEQ ID NO: 1593 and a heavy chain variable region encoded by a polynucleotide sequence comprising SEQ ID NO: 1750; a light chain variable region encoded by a polynucleotide sequence comprising SEQ ID NO: 1594 and a heavy chain variable region encoded by a polynucleotide sequence comprising SEQ ID NO: 1751; a light chain variable region encoded by a polynucleotide sequence comprising SEQ ID NO: 1595 and a heavy chain variable region encoded by a polynucleotide sequence comprising SEQ ID NO: 1752; a light chain variable region encoded by a polynucleotide sequence comprising SEQ ID NO: 1596 and a heavy chain variable region encoded by a polynucleotide sequence comprising SEQ ID NO: 1753; a light chain variable region encoded by a polynucleotide sequence comprising SEQ ID NO: 1597 and a heavy chain variable region encoded by a polynucleotide sequence comprising SEQ ID NO: 1754; a light chain variable region encoded by a polynucleotide sequence comprising SEQ ID NO: 1598 and a heavy chain variable region encoded by a polynucleotide sequence comprising SEQ ID NO: 1755; a light chain variable region encoded by a polynucleotide sequence comprising SEQ ID NO: 1599 and a heavy chain variable region encoded by a polynucleotide sequence comprising SEQ ID NO: 1756; a light chain variable region encoded by a polynucleotide sequence comprising SEQ ID NO: 1600 and a heavy chain variable region encoded by a polynucleotide sequence comprising SEQ ID NO: 1757; a light chain variable region encoded by a polynucleotide sequence comprising SEQ ID NO: 1601 and a heavy chain variable region encoded by a polynucleotide sequence comprising SEQ ID NO: 1758; a light chain variable region encoded by a polynucleotide sequence comprising SEQ ID NO: 1602 and a heavy chain variable region encoded by a polynucleotide sequence comprising SEQ ID NO: 1759; a light chain variable region encoded by a polynucleotide sequence comprising SEQ ID NO: 1603 and a heavy chain variable region encoded by a polynucleotide sequence comprising SEQ ID NO: 1760; a light chain variable region encoded by a polynucleotide sequence comprising SEQ ID NO: 1604 and a heavy chain variable region encoded by a polynucleotide sequence comprising SEQ ID NO: 1761; a light chain variable region encoded by a polynucleotide sequence comprising SEQ ID NO: 1605 and a heavy chain variable region encoded by a polynucleotide sequence comprising SEQ ID NO: 1762; a light chain variable region encoded by a polynucleotide sequence comprising SEQ ID NO: 1606 and a heavy chain variable region encoded by a polynucleotide sequence comprising SEQ ID NO: 1763; a light chain variable region encoded by a polynucleotide sequence comprising SEQ ID NO: 1607 and a heavy chain variable region encoded by a polynucleotide sequence comprising SEQ ID NO: 1764; a light chain variable region encoded by a polynucleotide sequence comprising SEQ ID NO: 1608 and a heavy chain variable region encoded by a polynucleotide sequence comprising SEQ ID NO: 1765; a light chain variable region encoded by a polynucleotide sequence comprising SEQ ID NO: 1609 and a heavy chain variable region encoded by a polynucleotide sequence comprising SEQ ID NO: 1766; a light chain variable region encoded by a polynucleotide sequence comprising SEQ ID NO: 1610 and a heavy chain variable region encoded by a polynucleotide sequence comprising SEQ ID NO: 1767; a light chain variable region encoded by a polynucleotide sequence comprising SEQ ID NO: 1611 and a heavy chain variable region encoded by a polynucleotide sequence comprising SEQ ID NO: 1768; a light chain variable region encoded by a polynucleotide sequence comprising SEQ ID NO: 1612 and a heavy chain variable region encoded by a polynucleotide sequence comprising SEQ ID NO: 1769; a light chain variable region encoded by a polynucleotide sequence comprising SEQ ID NO: 1613 and a heavy chain variable region encoded by a polynucleotide sequence comprising SEQ ID NO: 1770; a light chain variable region encoded by a polynucleotide sequence comprising SEQ ID NO: 1614 and a heavy chain variable region encoded by a polynucleotide sequence comprising SEQ ID NO: 1771; a light chain variable region encoded by a polynucleotide sequence comprising SEQ ID NO: 1615 and a heavy chain variable region encoded by a polynucleotide sequence comprising SEQ ID NO: 1772; a light chain variable region encoded by a polynucleotide sequence comprising SEQ ID NO: 1616 and a heavy chain variable region encoded by a polynucleotide sequence comprising SEQ ID NO: 1773; a light chain variable region encoded by a polynucleotide sequence comprising SEQ ID NO: 1617 and a heavy chain variable region encoded by a polynucleotide sequence comprising SEQ ID NO: 1774; a light chain variable region encoded by a polynucleotide sequence comprising SEQ ID NO: 1618 and a heavy chain variable region encoded by a polynucleotide sequence comprising SEQ ID NO: 1775; a light chain variable region encoded by a polynucleotide sequence comprising SEQ ID NO: 1619 and a heavy chain variable region encoded by a polynucleotide sequence comprising SEQ ID NO: 1776; a light chain variable region encoded by a polynucleotide sequence comprising SEQ ID NO: 1620 and a heavy chain variable region encoded by a polynucleotide sequence comprising SEQ ID NO: 1777; a light chain variable region encoded by a polynucleotide sequence comprising SEQ ID NO: 1621 and a heavy chain variable region encoded by a polynucleotide sequence comprising SEQ ID NO: 1778; a light chain variable region encoded by a polynucleotide sequence comprising SEQ ID NO: 1622 and a heavy chain variable region encoded by a polynucleotide sequence comprising SEQ ID NO: 1779; a light chain variable region encoded by a polynucleotide sequence comprising SEQ ID NO: 1623 and a heavy chain variable region encoded by a polynucleotide sequence comprising SEQ ID NO: 1780; a light chain variable region encoded by a polynucleotide sequence comprising SEQ ID NO: 1624 and a heavy chain variable region encoded by a polynucleotide sequence comprising SEQ ID NO: 1781; a light chain variable region encoded by a polynucleotide sequence comprising SEQ ID NO: 1625 and a heavy chain variable region encoded by a polynucleotide sequence comprising SEQ ID NO: 1782; a light chain variable region encoded by a polynucleotide sequence comprising SEQ ID NO: 1626 and a heavy chain variable region encoded by a polynucleotide sequence comprising SEQ ID NO: 1783; a light chain variable region encoded by a polynucleotide sequence comprising SEQ ID NO: 1627 and a heavy chain variable region encoded by a polynucleotide sequence comprising SEQ ID NO: 1784; a light chain variable region encoded by a polynucleotide sequence comprising SEQ ID NO: 1628 and a heavy chain variable region encoded by a polynucleotide sequence comprising SEQ ID NO: 1785; a light chain variable region encoded by a polynucleotide sequence comprising SEQ ID NO: 1629 and a heavy chain variable region encoded by a polynucleotide sequence comprising SEQ ID NO: 1786; a light chain variable region encoded by a polynucleotide sequence comprising SEQ ID NO: 1630 and a heavy chain variable region encoded by a polynucleotide sequence comprising SEQ ID NO: 1787; a light chain variable region encoded by a polynucleotide sequence comprising SEQ ID NO: 1631 and a heavy chain variable region encoded by a polynucleotide sequence comprising SEQ ID NO: 1788; a light chain variable region encoded by a polynucleotide sequence comprising SEQ ID NO: 1632 and a heavy chain variable region encoded by a polynucleotide sequence comprising SEQ ID NO: 1789; a light chain variable region encoded by a polynucleotide sequence comprising SEQ ID NO: 1633 and a heavy chain variable region encoded by a polynucleotide sequence comprising SEQ ID NO: 1790; a light chain variable region encoded by a polynucleotide sequence comprising SEQ ID NO: 1634 and a heavy chain variable region encoded by a polynucleotide sequence comprising SEQ ID NO: 1791; a light chain variable region encoded by a polynucleotide sequence comprising SEQ ID NO: 1635 and a heavy chain variable region encoded by a polynucleotide sequence comprising SEQ ID NO: 1792; a light chain variable region encoded by a polynucleotide sequence comprising SEQ ID NO: 1636 and a heavy chain variable region encoded by a polynucleotide sequence comprising SEQ ID NO: 1793; a light chain variable region encoded by a polynucleotide sequence comprising SEQ ID NO: 1637 and a heavy chain variable region encoded by a polynucleotide sequence comprising SEQ ID NO: 1794; a light chain variable region encoded by a polynucleotide sequence comprising SEQ ID NO: 1638 and a heavy chain variable region encoded by a polynucleotide sequence comprising SEQ ID NO: 1795; a light chain variable region encoded by a polynucleotide sequence comprising SEQ ID NO: 1639 and a heavy chain variable region encoded by a polynucleotide sequence comprising SEQ ID NO: 1796; a light chain variable region encoded by a polynucleotide sequence comprising SEQ ID NO: 1640 and a heavy chain variable region encoded by a polynucleotide sequence comprising SEQ ID NO: 1797; a light chain variable region encoded by a polynucleotide sequence comprising SEQ ID NO: 1641 and a heavy chain variable region encoded by a polynucleotide sequence comprising SEQ ID NO: 1798; a light chain variable region encoded by a polynucleotide sequence comprising SEQ ID NO: 1642 and a heavy chain variable region encoded by a polynucleotide sequence comprising SEQ ID NO: 1799; a light chain variable region encoded by a polynucleotide sequence comprising SEQ ID NO: 1643 and a heavy chain variable region encoded by a polynucleotide sequence comprising SEQ ID NO: 1800; a light chain variable region encoded by a polynucleotide sequence comprising SEQ ID NO: 1644 and a heavy chain variable region encoded by a polynucleotide sequence comprising SEQ ID NO: 1801; a light chain variable region encoded by a polynucleotide sequence comprising SEQ ID NO: 1645 and a heavy chain variable region encoded by a polynucleotide sequence comprising SEQ ID NO: 1802; a light chain variable region encoded by a polynucleotide sequence comprising SEQ ID NO: 1646 and a heavy chain variable region encoded by a polynucleotide sequence comprising SEQ ID NO: 1803; a light chain variable region encoded by a polynucleotide sequence comprising SEQ ID NO: 1647 and a heavy chain variable region encoded by a polynucleotide sequence comprising SEQ ID NO: 1804; a light chain variable region encoded by a polynucleotide sequence comprising SEQ ID NO: 1648 and a heavy chain variable region encoded by a polynucleotide sequence comprising SEQ ID NO: 1805; a light chain variable region encoded by a polynucleotide sequence comprising SEQ ID NO: 1649 and a heavy chain variable region encoded by a polynucleotide sequence comprising SEQ ID NO: 1806; a light chain variable region encoded by a polynucleotide sequence comprising SEQ ID NO: 1650 and a heavy chain variable region encoded by a polynucleotide sequence comprising SEQ ID NO: 1807; a light chain variable region encoded by a polynucleotide sequence comprising SEQ ID NO: 1651 and a heavy chain variable region encoded by a polynucleotide sequence comprising SEQ ID NO: 1808; a light chain variable region encoded by a polynucleotide sequence comprising SEQ ID NO: 1652 and a heavy chain variable region encoded by a polynucleotide sequence comprising SEQ ID NO: 1809; a light chain variable region encoded by a polynucleotide sequence comprising SEQ ID NO: 1653 and a heavy chain variable region encoded by a polynucleotide sequence comprising SEQ ID NO: 1810; a light chain variable region encoded by a polynucleotide sequence comprising SEQ ID NO: 1654 and a heavy chain variable region encoded by a polynucleotide sequence comprising SEQ ID NO: 1811; a light chain variable region encoded by a polynucleotide sequence comprising SEQ ID NO: 1655 and a heavy chain variable region encoded by a polynucleotide sequence comprising SEQ ID NO: 1812; a light chain variable region encoded by a polynucleotide sequence comprising SEQ ID NO: 1656 and a heavy chain variable region encoded by a polynucleotide sequence comprising SEQ ID NO: 1813; a light chain variable region encoded by a polynucleotide sequence comprising SEQ ID NO: 1657 and a heavy chain variable region encoded by a polynucleotide sequence comprising SEQ ID NO: 1814; a light chain variable region encoded by a polynucleotide sequence comprising SEQ ID NO: 1658 and a heavy chain variable region encoded by a polynucleotide sequence comprising SEQ ID NO: 1815; a light chain variable region encoded by a polynucleotide sequence comprising SEQ ID NO: 1659 and a heavy chain variable region encoded by a polynucleotide sequence comprising SEQ ID NO: 1816; a light chain variable region encoded by a polynucleotide sequence comprising SEQ ID NO: 1660 and a heavy chain variable region encoded by a polynucleotide sequence comprising SEQ ID NO: 1817; a light chain variable region encoded by a polynucleotide sequence comprising SEQ ID NO: 1661 and a heavy chain variable region encoded by a polynucleotide sequence comprising SEQ ID NO: 1818; a light chain variable region encoded by a polynucleotide sequence comprising SEQ ID NO: 1662 and a heavy chain variable region encoded by a polynucleotide sequence comprising SEQ ID NO: 1819; a light chain variable region encoded by a polynucleotide sequence comprising SEQ ID NO: 1663 and a heavy chain variable region encoded by a polynucleotide sequence comprising SEQ ID NO: 1820; a light chain variable region encoded by a polynucleotide sequence comprising SEQ ID NO: 1664 and a heavy chain variable region encoded by a polynucleotide sequence comprising SEQ ID NO: 1821; a light chain variable region encoded by a polynucleotide sequence comprising SEQ ID NO: 1665 and a heavy chain variable region encoded by a polynucleotide sequence comprising SEQ ID NO: 1822; a light chain variable region encoded by a polynucleotide sequence comprising SEQ ID NO: 1666 and a heavy chain variable region encoded by a polynucleotide sequence comprising SEQ ID NO: 1823; a light chain variable region encoded by a polynucleotide sequence comprising SEQ ID NO: 1667 and a heavy chain variable region encoded by a polynucleotide sequence comprising SEQ ID NO: 1824; a light chain variable region encoded by a polynucleotide sequence comprising SEQ ID NO: 1668 and a heavy chain variable region encoded by a polynucleotide sequence comprising SEQ ID NO: 1825; a light chain variable region encoded by a polynucleotide sequence comprising SEQ ID NO: 1669 and a heavy chain variable region encoded by a polynucleotide sequence comprising SEQ ID NO: 1826; a light chain variable region encoded by a polynucleotide sequence comprising SEQ ID NO: 1670 and a heavy chain variable region encoded by a polynucleotide sequence comprising SEQ ID NO: 1827; a light chain variable region encoded by a polynucleotide sequence comprising SEQ ID NO: 1671 and a heavy chain variable region encoded by a polynucleotide sequence comprising SEQ ID NO: 1828; a light chain variable region encoded by a polynucleotide sequence comprising SEQ ID NO: 1672 and a heavy chain variable region encoded by a polynucleotide sequence comprising SEQ ID NO: 1829; a light chain variable region encoded by a polynucleotide sequence comprising SEQ ID NO: 1673 and a heavy chain variable region encoded by a polynucleotide sequence comprising SEQ ID NO: 1830; a light chain variable region encoded by a polynucleotide sequence comprising SEQ ID NO: 1674 and a heavy chain variable region encoded by a polynucleotide sequence comprising SEQ ID NO: 1831; a light chain variable region encoded by a polynucleotide sequence comprising SEQ ID NO: 1675 and a heavy chain variable region encoded by a polynucleotide sequence comprising SEQ ID NO: 1832; a light chain variable region encoded by a polynucleotide sequence comprising SEQ ID NO: 1676 and a heavy chain variable region encoded by a polynucleotide sequence comprising SEQ ID NO: 1833; a light chain variable region encoded by a polynucleotide sequence comprising SEQ ID NO: 1677 and a heavy chain variable region encoded by a polynucleotide sequence comprising SEQ ID NO: 1834; a light chain variable region encoded by a polynucleotide sequence comprising SEQ ID NO: 1678 and a heavy chain variable region encoded by a polynucleotide sequence comprising SEQ ID NO: 1835; a light chain variable region encoded by a polynucleotide sequence comprising SEQ ID NO: 1679 and a heavy chain variable region encoded by a polynucleotide sequence comprising SEQ ID NO: 1836; a light chain variable region encoded by a polynucleotide sequence comprising SEQ ID NO: 1680 and a heavy chain variable region encoded by a polynucleotide sequence comprising SEQ ID NO: 1837; a light chain variable region encoded by a polynucleotide sequence comprising SEQ ID NO: 1681 and a heavy chain variable region encoded by a polynucleotide sequence comprising SEQ ID NO: 1838; a light chain variable region encoded by a polynucleotide sequence comprising SEQ ID NO: 1682 and a heavy chain variable region encoded by a polynucleotide sequence comprising SEQ ID NO: 1839; a light chain variable region encoded by a polynucleotide sequence comprising SEQ ID NO: 1683 and a heavy chain variable region encoded by a polynucleotide sequence comprising SEQ ID NO: 1840; a light chain variable region encoded by a polynucleotide sequence comprising SEQ ID NO: 1684 and a heavy chain variable region encoded by a polynucleotide sequence comprising SEQ ID NO: 1841; a light chain variable region encoded by a polynucleotide sequence comprising SEQ ID NO: 1685 and a heavy chain variable region encoded by a polynucleotide sequence comprising SEQ ID NO: 1842; a light chain variable region encoded by a polynucleotide sequence comprising SEQ ID NO: 1686 and a heavy chain variable region encoded by a polynucleotide sequence comprising SEQ ID NO: 1843; a light chain variable region encoded by a polynucleotide sequence comprising SEQ ID NO: 1687 and a heavy chain variable region encoded by a polynucleotide sequence comprising SEQ ID NO: 1844; a light chain variable region encoded by a polynucleotide sequence comprising SEQ ID NO: 1688 and a heavy chain variable region encoded by a polynucleotide sequence comprising SEQ ID NO: 1845; a light chain variable region encoded by a polynucleotide sequence comprising SEQ ID NO: 1689 and a heavy chain variable region encoded by a polynucleotide sequence comprising SEQ ID NO: 1846; a light chain variable region encoded by a polynucleotide sequence comprising SEQ ID NO: 1690 and a heavy chain variable region encoded by a polynucleotide sequence comprising SEQ ID NO: 1847; a light chain variable region encoded by a polynucleotide sequence comprising SEQ ID NO: 1691 and a heavy chain variable region encoded by a polynucleotide sequence comprising SEQ ID NO: 1848; a light chain variable region encoded by a polynucleotide sequence comprising SEQ ID NO: 1692 and a heavy chain variable region encoded by a polynucleotide sequence comprising SEQ ID NO: 1849; a light chain variable region encoded by a polynucleotide sequence comprising SEQ ID NO: 1693 and a heavy chain variable region encoded by a polynucleotide sequence comprising SEQ ID NO: 1850; a light chain variable region encoded by a polynucleotide sequence comprising SEQ ID NO: 1694 and a heavy chain variable region encoded by a polynucleotide sequence comprising SEQ ID NO: 1851; a light chain variable region encoded by a polynucleotide sequence comprising SEQ ID NO: 1695 and a heavy chain variable region encoded by a polynucleotide sequence comprising SEQ ID NO: 1852; a light chain variable region encoded by a polynucleotide sequence comprising SEQ ID NO: 1696 and a heavy chain variable region encoded by a polynucleotide sequence comprising SEQ ID NO: 1853; a light chain variable region encoded by a polynucleotide sequence comprising SEQ ID NO: 1697 and a heavy chain variable region encoded by a polynucleotide sequence comprising SEQ ID NO: 1854; a light chain variable region encoded by a polynucleotide sequence comprising SEQ ID NO: 1698 and a heavy chain variable region encoded by a polynucleotide sequence comprising SEQ ID NO: 1855; a light chain variable region encoded by a polynucleotide sequence comprising SEQ ID NO: 1699 and a heavy chain variable region encoded by a polynucleotide sequence comprising SEQ ID NO: 1856; a light chain variable region encoded by a polynucleotide sequence comprising SEQ ID NO: 1700 and a heavy chain variable region encoded by a polynucleotide sequence comprising SEQ ID NO: 1857; a light chain variable region encoded by a polynucleotide sequence comprising SEQ ID NO: 1701 and a heavy chain variable region encoded by a polynucleotide sequence comprising SEQ ID NO: 1858; a light chain variable region encoded by a polynucleotide sequence comprising SEQ ID NO: 1702 and a heavy chain variable region encoded by a polynucleotide sequence comprising SEQ ID NO: 1859; a light chain variable region encoded by a polynucleotide sequence comprising SEQ ID NO: 1703 and a heavy chain variable region encoded by a polynucleotide sequence comprising SEQ ID NO: 1860; a light chain variable region encoded by a polynucleotide sequence comprising SEQ ID NO: 1704 and a heavy chain variable region encoded by a polynucleotide sequence comprising SEQ ID NO: 1861; a light chain variable region encoded by a polynucleotide sequence comprising SEQ ID NO: 1705 and a heavy chain variable region encoded by a polynucleotide sequence comprising SEQ ID NO: 1862; a light chain variable region encoded by a polynucleotide sequence comprising SEQ ID NO: 1706 and a heavy chain variable region encoded by a polynucleotide sequence comprising SEQ ID NO: 1863; a light chain variable region encoded by a polynucleotide sequence comprising SEQ ID NO: 1707 and a heavy chain variable region encoded by a polynucleotide sequence comprising SEQ ID NO: 1864; a light chain variable region encoded by a polynucleotide sequence comprising SEQ ID NO: 1708 and a heavy chain variable region encoded by a polynucleotide sequence comprising SEQ ID NO: 1865; a light chain variable region encoded by a polynucleotide sequence comprising SEQ ID NO: 1709 and a heavy chain variable region encoded by a polynucleotide sequence comprising SEQ ID NO: 1866; a light chain variable region encoded by a polynucleotide sequence comprising SEQ ID NO: 1710 and a heavy chain variable region encoded by a polynucleotide sequence comprising SEQ ID NO: 1867; a light chain variable region encoded by a polynucleotide sequence comprising SEQ ID NO: 1711 and a heavy chain variable region encoded by a polynucleotide sequence comprising SEQ ID NO: 1868; a light chain variable region encoded by a polynucleotide sequence comprising SEQ ID NO: 1712 and a heavy chain variable region encoded by a polynucleotide sequence comprising SEQ ID NO: 1869; a light chain variable region encoded by a polynucleotide sequence comprising SEQ ID NO: 1713 and a heavy chain variable region encoded by a polynucleotide sequence comprising SEQ ID NO: 1870; a light chain variable region encoded by a polynucleotide sequence comprising SEQ ID NO: 1714 and a heavy chain variable region encoded by a polynucleotide sequence comprising SEQ ID NO: 1871; a light chain variable region encoded by a polynucleotide sequence comprising SEQ ID NO: 1715 and a heavy chain variable region encoded by a polynucleotide sequence comprising SEQ ID NO: 1872; a light chain variable region encoded by a polynucleotide sequence comprising SEQ ID NO: 1716 and a heavy chain variable region encoded by a polynucleotide sequence comprising SEQ ID NO: 1873; a light chain variable region encoded by a polynucleotide sequence comprising SEQ ID NO: 1717 and a heavy chain variable region encoded by a polynucleotide sequence comprising SEQ ID NO: 1874; a light chain variable region encoded by a polynucleotide sequence comprising SEQ ID NO: 1718 and a heavy chain variable region encoded by a polynucleotide sequence comprising SEQ ID NO: 1875; a light chain variable region encoded by a polynucleotide sequence comprising SEQ ID NO: 1719 and a heavy chain variable region encoded by a polynucleotide sequence comprising SEQ ID NO: 1876; a light chain variable region encoded by a polynucleotide sequence comprising SEQ ID NO: 1720 and a heavy chain variable region encoded by a polynucleotide sequence comprising SEQ ID NO: 1877; a light chain variable region encoded by a polynucleotide sequence comprising SEQ ID NO: 1721 and a heavy chain variable region encoded by a polynucleotide sequence comprising SEQ ID NO: 1878; a light chain variable region encoded by a polynucleotide sequence comprising SEQ ID NO: 1722 and a heavy chain variable region encoded by a polynucleotide sequence comprising SEQ ID NO: 1879; a light chain variable region encoded by a polynucleotide sequence comprising SEQ ID NO: 1723 and a heavy chain variable region encoded by a polynucleotide sequence comprising SEQ ID NO: 1880; a light chain variable region encoded by a polynucleotide sequence comprising SEQ ID NO: 1724 and a heavy chain variable region encoded by a polynucleotide sequence comprising SEQ ID NO: 1881; a light chain variable region encoded by a polynucleotide sequence comprising SEQ ID NO: 1725 and a heavy chain variable region encoded by a polynucleotide sequence comprising SEQ ID NO: 1882; a light chain variable region encoded by a polynucleotide sequence comprising SEQ ID NO: 1726 and a heavy chain variable region encoded by a polynucleotide sequence comprising SEQ ID NO: 1883; and a light chain variable region encoded by a polynucleotide sequence comprising SEQ ID NO: 1727 and a heavy chain variable region encoded by a polynucleotide sequence comprising SEQ ID NO: 1884.

[0146] Some antigen binding proteins comprise a variable light domain and a variable heavy domain as listed in one of the rows for one of the antibodies listed in TABLE 3 and TABLE 8. In some instances, the antigen binding protein comprises two identical variable light domains and two identical variable heavy domains from one of the antibodies listed in TABLE 3 and TABLE 8. Some antigen binding proteins that are provided comprise a variable light domain and a variable heavy domain as listed in one of the rows for one of the antibodies listed in TABLE 3 and TABLE 8, except that one or both of the domains differs from the sequence specified in the table at only 1, 2, 3, 4, 5, 6, 7, 8, 9, 10, 11, 12, 13, 14 or 15 amino acid residues, wherein each such sequence difference is independently either a single amino acid deletion, insertion or substitution, with the deletions, insertions and/or substitutions resulting in no more than 1, 2, 3, 4, 5, 6, 7, 8, 9, 10, 11, 12, 13, 14 or 15 amino acid changes relative to the variable domain sequences specified in TABLE 3 and TABLE 8. In one embodiment, the antigen binding protein comprises a variable region sequence from Table 3 or TABLE 8, but with the N-terminal methionine deleted. Other antigen binding proteins also comprise a variable light domain and a variable heavy domain as listed in one of the rows for one of the antibodies listed in TABLE 3 and TABLE 8, except that one or both of the domains differs from the sequence specified in the table in that the heavy chain variable domain and/or light chain variable domain comprises or consists of a sequence of amino acids that has at least 70%, 75%, 80%, 85%, 90%, 95%, 96%, 97%, 98%, or 99% sequence identity to the amino acid sequences of the heavy chain variable domain or light chain variable domain sequences as specified in TABLE 3 and TABLE 8.

[0147] In another aspect, the antigen binding protein consists just of a variable light or variable heavy domain from an antibody listed in TABLE 3 and TABLE 8. In still another aspect, the antigen binding protein comprises two or more of the same variable heavy domains or two or more of the same variable light domains from those listed in TABLE 3 and TABLE 8. Such domain antibodies can be fused together or joined via a linker as described in greater detail below. The domain antibodies can also be fused or linked to one or more molecules to extend the half-life (e.g., PEG or albumin).

[0148] Other antigen binding proteins that are provided are variants of antibodies formed by combination of the heavy and light chains shown in TABLE 3 and TABLE 8 and comprise light and/or heavy chains that each have at least 70%, 75%, 80%, 85%, 90%, 95%, 96%, 97%, 98% or 99% identity to the amino acid sequences of these chains. In some instances, such antibodies include at least one heavy chain and one light chain, whereas in other instances the variant forms contain two identical light chains and two identical heavy chains.

[0149] The various combinations of heavy chain variable regions may be combined with any of the various combinations of light chain variable regions.

[0150] In a further embodiment, the isolated antigen binding protein provided herein is a human antibody comprising a sequence as set forth in TABLE 3 and TABLE 8 and is of the IgG₁-, IgG₂- IgG₃- or IgG₄-type.

[0151] The antigen binding proteins disclosed herein are polypeptides into which one or more CDRs are grafted, inserted and/or joined. An antigen binding protein can have 1, 2, 3, 4, 5 or 6 CDRs. An antigen binding protein thus can have, for example, one heavy chain CDR1 (“CDRH1”), and/or one heavy chain CDR2 (“CDRH2”), and/or one heavy chain CDR3 (“CDRH3”), and/or one light chain CDR1 (“CDRL1”), and/or one light chain CDR2 (“CDRL2”), and/or one light chain CDR3 (“CDRL3”). Some antigen binding proteins include both a CDRH3 and a CDRL3. Specific light and heavy chain CDRs are identified in TABLEs 4A and 4B, respectively, and TABLEs 9A and 9B, respectively.

[0152] Complementarity determining regions (CDRs) and framework regions (FR) of a given antibody may be identified using the system described by Kabat et al. in Sequences of Proteins of Immunological Interest, 5th Ed., US Dept. of Health and Human Services, PHS, NIH, NIH Publication no. 91-3242, 1991. Certain antibodies that are disclosed herein comprise one or more amino acid sequences that are identical or have substantial sequence identity to the amino acid sequences of one or more of the CDRs presented in TABLES 4A and 4B and TABLES 9A and 9B. These CDRs use the system described by Kabat et al. as noted above.

[0153] The structure and properties of CDRs within a naturally occurring antibody has been described, supra. Briefly, in a traditional antibody, the CDRs are embedded within a framework in the heavy and light chain variable region where they constitute the regions responsible for antigen binding and recognition. A variable region comprises at least three heavy or light chain CDRs, see, supra (Kabat et al., 1991, Sequences of Proteins of Immunological Interest, Public Health Service N.I.H., Bethesda, Md.; see also Chothia and Lesk, 1987, J. Mol. Biol. 196:901-917; Chothia et al., 1989, Nature 342: 877-883), within a framework region (designated framework regions 1-4, FR1, FR2, FR3, and FR4, by Kabat et al., 1991, supra; see also Chothia and Lesk, 1987, supra). The CDRs provided herein, however, may not only be used to define the antigen binding domain of a traditional antibody structure, but may be embedded in a variety of other polypeptide structures, as described herein.

[0154] In one embodiment the antibody or fragment thereof comprises a CDRL1, a CDRL2, a CDRL3, a CDRH1, a CDRH2, and a CDRH3. In one embodiment the antibody or fragment thereof comprises a CDRL1 comprising a sequence selected from the group consisting of SEQ ID NOs: 629-785. In one embodiment the antibody or fragment thereof comprises a CDRL2 comprising a sequence selected from the group consisting of SEQ ID NOs: 786-942. In one embodiment the antibody or fragment thereof comprises a CDRL3 comprising a sequence selected from the group consisting of SEQ ID NOs: 943-1099. In one embodiment the antibody or fragment thereof comprises a CDRH1 comprising a sequence selected from the group consisting of SEQ ID NOs: 1100-1256. In one embodiment the antibody or fragment thereof comprises a CDRH2 comprising a sequence selected from the group consisting of SEQ ID NOs: 1257-1413. In one embodiment the antibody or fragment thereof comprises a CDRH3 comprising a sequence selected from the group consisting of SEQ ID NOs: 1414-1570. In one embodiment the antibody or fragment thereof comprises a CDRL1, a CDRL2, a CDRL3, a CDRH1, a CDRH2, and a CDRH3, wherein each CDRL1, CDRL2, CDRL3, CDRH1, CDRH2, and CDRH3, respectively, comprises a sequence selected from the group consisting of SEQ ID NO: 629, SEQ ID NO: 786, SEQ ID NO: 943, SEQ ID NO: 1100, SEQ ID NO: 1257, and SEQ ID NO: 1414; SEQ ID NO: 630, SEQ ID NO: 787, SEQ ID NO: 944, SEQ ID NO: 1101, SEQ ID NO: 1258, and SEQ ID NO: 1415; SEQ ID NO: 631, SEQ ID NO: 788, SEQ ID NO: 945, SEQ ID NO: 1102, SEQ ID NO: 1259, and SEQ ID NO: 1416; SEQ ID NO: 632, SEQ ID NO: 789, SEQ ID NO: 946, SEQ ID NO: 1103, SEQ ID NO: 1260, and SEQ ID NO: 1417; SEQ ID NO: 633, SEQ ID NO: 790, SEQ ID NO: 947, SEQ ID NO: 1104, SEQ ID NO: 1261, and SEQ ID NO: 1418; SEQ ID NO: 634, SEQ ID NO: 791, SEQ ID NO: 948, SEQ ID NO: 1105, SEQ ID NO: 1262, and SEQ ID NO: 1419; SEQ ID NO: 635, SEQ ID NO: 792, SEQ ID NO: 949, SEQ ID NO: 1106, SEQ ID NO: 1263, and SEQ ID NO: 1420; SEQ ID NO: 636, SEQ ID NO: 793, SEQ ID NO: 950, SEQ ID NO: 1107, SEQ ID NO: 1264, and SEQ ID NO: 1421; SEQ ID NO: 637, SEQ ID NO: 794, SEQ ID NO: 951, SEQ ID NO: 1108, SEQ ID NO: 1265, and SEQ ID NO: 1422; SEQ ID NO: 638, SEQ ID NO: 795, SEQ ID NO: 952, SEQ ID NO: 1109, SEQ ID NO: 1266, and SEQ ID NO: 1423; SEQ ID NO: 639, SEQ ID NO: 796, SEQ ID NO: 953, SEQ ID NO: 1110, SEQ ID NO: 1267, and SEQ ID NO: 1424; SEQ ID NO: 640, SEQ ID NO: 797, SEQ ID NO: 954, SEQ ID NO: 1111, SEQ ID NO: 1268, and SEQ ID NO: 1425; SEQ ID NO: 641, SEQ ID NO: 798, SEQ ID NO: 955, SEQ ID NO: 1112, SEQ ID NO: 1269, and SEQ ID NO: 1426; SEQ ID NO: 642, SEQ ID NO: 799, SEQ ID NO: 956, SEQ ID NO: 1113, SEQ ID NO: 1270, and SEQ ID NO: 1427; SEQ ID NO: 643, SEQ ID NO: 800, SEQ ID NO: 957, SEQ ID NO: 1114, SEQ ID NO: 1271, and SEQ ID NO: 1428; SEQ ID NO: 644, SEQ ID NO: 801, SEQ ID NO: 958, SEQ ID NO: 1115, SEQ ID NO: 1272, and SEQ ID NO: 1429; SEQ ID NO: 645, SEQ ID NO: 802, SEQ ID NO: 959, SEQ ID NO: 1116, SEQ ID NO: 1273, and SEQ ID NO: 1430; SEQ ID NO: 646, SEQ ID NO: 803, SEQ ID NO: 960, SEQ ID NO: 1117, SEQ ID NO: 1274, and SEQ ID NO: 1431; SEQ ID NO: 647, SEQ ID NO: 804, SEQ ID NO: 961, SEQ ID NO: 1118, SEQ ID NO: 1275, and SEQ ID NO: 1432; SEQ ID NO: 648, SEQ ID NO: 805, SEQ ID NO: 962, SEQ ID NO: 1119, SEQ ID NO: 1276, and SEQ ID NO: 1433; SEQ ID NO: 649, SEQ ID NO: 806, SEQ ID NO: 963, SEQ ID NO: 1120, SEQ ID NO: 1277, and SEQ ID NO: 1434; SEQ ID NO: 650, SEQ ID NO: 807, SEQ ID NO: 964, SEQ ID NO: 1121, SEQ ID NO: 1278, and SEQ ID NO: 1435; SEQ ID NO: 651, SEQ ID NO: 808, SEQ ID NO: 965, SEQ ID NO: 1122, SEQ ID NO: 1279, and SEQ ID NO: 1436; SEQ ID NO: 652, SEQ ID NO: 809, SEQ ID NO: 966, SEQ ID NO: 1123, SEQ ID NO: 1280, and SEQ ID NO: 1437; SEQ ID NO: 653, SEQ ID NO: 810, SEQ ID NO: 967, SEQ ID NO: 1124, SEQ ID NO: 1281, and SEQ ID NO: 1438; SEQ ID NO: 654, SEQ ID NO: 811, SEQ ID NO: 968, SEQ ID NO: 1125, SEQ ID NO: 1282, and SEQ ID NO: 1439; SEQ ID NO: 655, SEQ ID NO: 812, SEQ ID NO: 969, SEQ ID NO: 1126, SEQ ID NO: 1283, and SEQ ID NO: 1440; SEQ ID NO: 656, SEQ ID NO: 813, SEQ ID NO: 970, SEQ ID NO: 1127, SEQ ID NO: 1284, and SEQ ID NO: 1441; SEQ ID NO: 657, SEQ ID NO: 814, SEQ ID NO: 971, SEQ ID NO: 1128, SEQ ID NO: 1285, and SEQ ID NO: 1442; SEQ ID NO: 658, SEQ ID NO: 815, SEQ ID NO: 972, SEQ ID NO: 1129, SEQ ID NO: 1286, and SEQ ID NO: 1443; SEQ ID NO: 659, SEQ ID NO: 816, SEQ ID NO: 973, SEQ ID NO: 1130, SEQ ID NO: 1287, and SEQ ID NO: 1444; SEQ ID NO: 660, SEQ ID NO: 817, SEQ ID NO: 974, SEQ ID NO: 1131, SEQ ID NO: 1288, and SEQ ID NO: 1445; SEQ ID NO: 661, SEQ ID NO: 818, SEQ ID NO: 975, SEQ ID NO: 1132, SEQ ID NO: 1289, and SEQ ID NO: 1446; SEQ ID NO: 662, SEQ ID NO: 819, SEQ ID NO: 976, SEQ ID NO: 1133, SEQ ID NO: 1290, and SEQ ID NO: 1447; SEQ ID NO: 663, SEQ ID NO: 820, SEQ ID NO: 977, SEQ ID NO: 1134, SEQ ID NO: 1291, and SEQ ID NO: 1448; SEQ ID NO: 664, SEQ ID NO: 821, SEQ ID NO: 978, SEQ ID NO: 1135, SEQ ID NO: 1292, and SEQ ID NO: 1449; SEQ ID NO: 665, SEQ ID NO: 822, SEQ ID NO: 979, SEQ ID NO: 1136, SEQ ID NO: 1293, and SEQ ID NO: 1450; SEQ ID NO: 666, SEQ ID NO: 823, SEQ ID NO: 980, SEQ ID NO: 1137, SEQ ID NO: 1294, and SEQ ID NO: 1451; SEQ ID NO: 667, SEQ ID NO: 824, SEQ ID NO: 981, SEQ ID NO: 1138, SEQ ID NO: 1295, and SEQ ID NO: 1452; SEQ ID NO: 668, SEQ ID NO: 825, SEQ ID NO: 982, SEQ ID NO: 1139, SEQ ID NO: 1296, and SEQ ID NO: 1453; SEQ ID NO: 669, SEQ ID NO: 826, SEQ ID NO: 983, SEQ ID NO: 1140, SEQ ID NO: 1297, and SEQ ID NO: 1454; SEQ ID NO: 670, SEQ ID NO: 827, SEQ ID NO: 984, SEQ ID NO: 1141, SEQ ID NO: 1298, and SEQ ID NO: 1455; SEQ ID NO: 671, SEQ ID NO: 828, SEQ ID NO: 985, SEQ ID NO: 1142, SEQ ID NO: 1299, and SEQ ID NO: 1456; SEQ ID NO: 672, SEQ ID NO: 829, SEQ ID NO: 986, SEQ ID NO: 1143, SEQ ID NO: 1300, and SEQ ID NO: 1457; SEQ ID NO: 673, SEQ ID NO: 830, SEQ ID NO: 987, SEQ ID NO: 1144, SEQ ID NO: 1301, and SEQ ID NO: 1458; SEQ ID NO: 674, SEQ ID NO: 831, SEQ ID NO: 988, SEQ ID NO: 1145, SEQ ID NO: 1302, and SEQ ID NO: 1459; SEQ ID NO: 675, SEQ ID NO: 832, SEQ ID NO: 989, SEQ ID NO: 1146, SEQ ID NO: 1303, and SEQ ID NO: 1460; SEQ ID NO: 676, SEQ ID NO: 833, SEQ ID NO: 990, SEQ ID NO: 1147, SEQ ID NO: 1304, and SEQ ID NO: 1461; SEQ ID NO: 677, SEQ ID NO: 834, SEQ ID NO: 991, SEQ ID NO: 1148, SEQ ID NO: 1305, and SEQ ID NO: 1462; SEQ ID NO: 678, SEQ ID NO: 835, SEQ ID NO: 992, SEQ ID NO: 1149, SEQ ID NO: 1306, and SEQ ID NO: 1463; SEQ ID NO: 679, SEQ ID NO: 836, SEQ ID NO: 993, SEQ ID NO: 1150, SEQ ID NO: 1307, and SEQ ID NO: 1464; SEQ ID NO: 680, SEQ ID NO: 837, SEQ ID NO: 994, SEQ ID NO: 1151, SEQ ID NO: 1308, and SEQ ID NO: 1465; SEQ ID NO: 681, SEQ ID NO: 838, SEQ ID NO: 995, SEQ ID NO: 1152, SEQ ID NO: 1309, and SEQ ID NO: 1466; SEQ ID NO: 682, SEQ ID NO: 839, SEQ ID NO: 996, SEQ ID NO: 1153, SEQ ID NO: 1310, and SEQ ID NO: 1467; SEQ ID NO: 683, SEQ ID NO: 840, SEQ ID NO: 997, SEQ ID NO: 1154, SEQ ID NO: 1311, and SEQ ID NO: 1468; SEQ ID NO: 684, SEQ ID NO: 841, SEQ ID NO: 998, SEQ ID NO: 1155, SEQ ID NO: 1312, and SEQ ID NO: 1469; SEQ ID NO: 685, SEQ ID NO: 842, SEQ ID NO: 999, SEQ ID NO: 1156, SEQ ID NO: 1313, and SEQ ID NO: 1470; SEQ ID NO: 686, SEQ ID NO: 843, SEQ ID NO: 1000, SEQ ID NO: 1157, SEQ ID NO: 1314, and SEQ ID NO: 1471; SEQ ID NO: 687, SEQ ID NO: 844, SEQ ID NO: 1001, SEQ ID NO: 1158, SEQ ID NO: 1315, and SEQ ID NO: 1472; SEQ ID NO: 688, SEQ ID NO: 845, SEQ ID NO: 1002, SEQ ID NO: 1159, SEQ ID NO: 1316, and SEQ ID NO: 1473; SEQ ID NO: 689, SEQ ID NO: 846, SEQ ID NO: 1003, SEQ ID NO: 1160, SEQ ID NO: 1317, and SEQ ID NO: 1474; SEQ ID NO: 690, SEQ ID NO: 847, SEQ ID NO: 1004, SEQ ID NO: 1161, SEQ ID NO: 1318, and SEQ ID NO: 1475; SEQ ID NO: 691, SEQ ID NO: 848, SEQ ID NO: 1005, SEQ ID NO: 1162, SEQ ID NO: 1319, and SEQ ID NO: 1476; SEQ ID NO: 692, SEQ ID NO: 849, SEQ ID NO: 1006, SEQ ID NO: 1163, SEQ ID NO: 1320, and SEQ ID NO: 1477; SEQ ID NO: 693, SEQ ID NO: 850, SEQ ID NO: 1007, SEQ ID NO: 1164, SEQ ID NO: 1321, and SEQ ID NO: 1478; SEQ ID NO: 694, SEQ ID NO: 851, SEQ ID NO: 1008, SEQ ID NO: 1165, SEQ ID NO: 1322, and SEQ ID NO: 1479; SEQ ID NO: 695, SEQ ID NO: 852, SEQ ID NO: 1009, SEQ ID NO: 1166, SEQ ID NO: 1323, and SEQ ID NO: 1480; SEQ ID NO: 696, SEQ ID NO: 853, SEQ ID NO: 1010, SEQ ID NO: 1167, SEQ ID NO: 1324, and SEQ ID NO: 1481; SEQ ID NO: 697, SEQ ID NO: 854, SEQ ID NO: 1011, SEQ ID NO: 1168, SEQ ID NO: 1325, and SEQ ID NO: 1482; SEQ ID NO: 698, SEQ ID NO: 855, SEQ ID NO: 1012, SEQ ID NO: 1169, SEQ ID NO: 1326, and SEQ ID NO: 1483; SEQ ID NO: 699, SEQ ID NO: 856, SEQ ID NO: 1013, SEQ ID NO: 1170, SEQ ID NO: 1327, and SEQ ID NO: 1484; SEQ ID NO: 700, SEQ ID NO: 857, SEQ ID NO: 1014, SEQ ID NO: 1171, SEQ ID NO: 1328, and SEQ ID NO: 1485; SEQ ID NO: 701, SEQ ID NO: 858, SEQ ID NO: 1015, SEQ ID NO: 1172, SEQ ID NO: 1329, and SEQ ID NO: 1486; SEQ ID NO: 702, SEQ ID NO: 859, SEQ ID NO: 1016, SEQ ID NO: 1173, SEQ ID NO: 1330, and SEQ ID NO: 1487; SEQ ID NO: 703, SEQ ID NO: 860, SEQ ID NO: 1017, SEQ ID NO: 1174, SEQ ID NO: 1331, and SEQ ID NO: 1488; SEQ ID NO: 704, SEQ ID NO: 861, SEQ ID NO: 1018, SEQ ID NO: 1175, SEQ ID NO: 1332, and SEQ ID NO: 1489; SEQ ID NO: 705, SEQ ID NO: 862, SEQ ID NO: 1019, SEQ ID NO: 1176, SEQ ID NO: 1333, and SEQ ID NO: 1490; SEQ ID NO: 706, SEQ ID NO: 863, SEQ ID NO: 1020, SEQ ID NO: 1177, SEQ ID NO: 1334, and SEQ ID NO: 1491; SEQ ID NO: 707, SEQ ID NO: 864, SEQ ID NO: 1021, SEQ ID NO: 1178, SEQ ID NO: 1335, and SEQ ID NO: 1492; SEQ ID NO: 708, SEQ ID NO: 865, SEQ ID NO: 1022, SEQ ID NO: 1179, SEQ ID NO: 1336, and SEQ ID NO: 1493; SEQ ID NO: 709, SEQ ID NO: 866, SEQ ID NO: 1023, SEQ ID NO: 1180, SEQ ID NO: 1337, and SEQ ID NO: 1494; SEQ ID NO: 710, SEQ ID NO: 867, SEQ ID NO: 1024, SEQ ID NO: 1181, SEQ ID NO: 1338, and SEQ ID NO: 1495; SEQ ID NO: 711, SEQ ID NO: 868, SEQ ID NO: 1025, SEQ ID NO: 1182, SEQ ID NO: 1339, and SEQ ID NO: 1496; SEQ ID NO: 712, SEQ ID NO: 869, SEQ ID NO: 1026, SEQ ID NO: 1183, SEQ ID NO: 1340, and SEQ ID NO: 1497; SEQ ID NO: 713, SEQ ID NO: 870, SEQ ID NO: 1027, SEQ ID NO: 1184, SEQ ID NO: 1341, and SEQ ID NO: 1498; SEQ ID NO: 714, SEQ ID NO: 871, SEQ ID NO: 1028, SEQ ID NO: 1185, SEQ ID NO: 1342, and SEQ ID NO: 1499; SEQ ID NO: 715, SEQ ID NO: 872, SEQ ID NO: 1029, SEQ ID NO: 1186, SEQ ID NO: 1343, and SEQ ID NO: 1500; SEQ ID NO: 716, SEQ ID NO: 873, SEQ ID NO: 1030, SEQ ID NO: 1187, SEQ ID NO: 1344, and SEQ ID NO: 1501; SEQ ID NO: 717, SEQ ID NO: 874, SEQ ID NO: 1031, SEQ ID NO: 1188, SEQ ID NO: 1345, and SEQ ID NO: 1502; SEQ ID NO: 718, SEQ ID NO: 875, SEQ ID NO: 1032, SEQ ID NO: 1189, SEQ ID NO: 1346, and SEQ ID NO: 1503; SEQ ID NO: 719, SEQ ID NO: 876, SEQ ID NO: 1033, SEQ ID NO: 1190, SEQ ID NO: 1347, and SEQ ID NO: 1504; SEQ ID NO: 720, SEQ ID NO: 877, SEQ ID NO: 1034, SEQ ID NO: 1191, SEQ ID NO: 1348, and SEQ ID NO: 1505; SEQ ID NO: 721, SEQ ID NO: 878, SEQ ID NO: 1035, SEQ ID NO: 1192, SEQ ID NO: 1349, and SEQ ID NO: 1506; SEQ ID NO: 722, SEQ ID NO: 879, SEQ ID NO: 1036, SEQ ID NO: 1193, SEQ ID NO: 1350, and SEQ ID NO: 1507; SEQ ID NO: 723, SEQ ID NO: 880, SEQ ID NO: 1037, SEQ ID NO: 1194, SEQ ID NO: 1351, and SEQ ID NO: 1508; SEQ ID NO: 724, SEQ ID NO: 881, SEQ ID NO: 1038, SEQ ID NO: 1195, SEQ ID NO: 1352, and SEQ ID NO: 1509; SEQ ID NO: 725, SEQ ID NO: 882, SEQ ID NO: 1039, SEQ ID NO: 1196, SEQ ID NO: 1353, and SEQ ID NO: 1510; SEQ ID NO: 726, SEQ ID NO: 883, SEQ ID NO: 1040, SEQ ID NO: 1197, SEQ ID NO: 1354, and SEQ ID NO: 1511; SEQ ID NO: 727, SEQ ID NO: 884, SEQ ID NO: 1041, SEQ ID NO: 1198, SEQ ID NO: 1355, and SEQ ID NO: 1512; SEQ ID NO: 728, SEQ ID NO: 885, SEQ ID NO: 1042, SEQ ID NO: 1199, SEQ ID NO: 1356, and SEQ ID NO: 1513; SEQ ID NO: 729, SEQ ID NO: 886, SEQ ID NO: 1043, SEQ ID NO: 1200, SEQ ID NO: 1357, and SEQ ID NO: 1514; SEQ ID NO: 730, SEQ ID NO: 887, SEQ ID NO: 1044, SEQ ID NO: 1201, SEQ ID NO: 1358, and SEQ ID NO: 1515; SEQ ID NO: 731, SEQ ID NO: 888, SEQ ID NO: 1045, SEQ ID NO: 1202, SEQ ID NO: 1359, and SEQ ID NO: 1516; SEQ ID NO: 732, SEQ ID NO: 889, SEQ ID NO: 1046, SEQ ID NO: 1203, SEQ ID NO: 1360, and SEQ ID NO: 1517; SEQ ID NO: 733, SEQ ID NO: 890, SEQ ID NO: 1047, SEQ ID NO: 1204, SEQ ID NO: 1361, and SEQ ID NO: 1518; SEQ ID NO: 734, SEQ ID NO: 891, SEQ ID NO: 1048, SEQ ID NO: 1205, SEQ ID NO: 1362, and SEQ ID NO: 1519; SEQ ID NO: 735, SEQ ID NO: 892, SEQ ID NO: 1049, SEQ ID NO: 1206, SEQ ID NO: 1363, and SEQ ID NO: 1520; SEQ ID NO: 736, SEQ ID NO: 893, SEQ ID NO: 1050, SEQ ID NO: 1207, SEQ ID NO: 1364, and SEQ ID NO: 1521; SEQ ID NO: 737, SEQ ID NO: 894, SEQ ID NO: 1051, SEQ ID NO: 1208, SEQ ID NO: 1365, and SEQ ID NO: 1522; SEQ ID NO: 738, SEQ ID NO: 895, SEQ ID NO: 1052, SEQ ID NO: 1209, SEQ ID NO: 1366, and SEQ ID NO: 1523; SEQ ID NO: 739, SEQ ID NO: 896, SEQ ID NO: 1053, SEQ ID NO: 1210, SEQ ID NO: 1367, and SEQ ID NO: 1524; SEQ ID NO: 740, SEQ ID NO: 897, SEQ ID NO: 1054, SEQ ID NO: 1211, SEQ ID NO: 1368, and SEQ ID NO: 1525; SEQ ID NO: 741, SEQ ID NO: 898, SEQ ID NO: 1055, SEQ ID NO: 1212, SEQ ID NO: 1369, and SEQ ID NO: 1526; SEQ ID NO: 742, SEQ ID NO: 899, SEQ ID NO: 1056, SEQ ID NO: 1213, SEQ ID NO: 1370, and SEQ ID NO: 1527; SEQ ID NO: 743, SEQ ID NO: 900, SEQ ID NO: 1057, SEQ ID NO: 1214, SEQ ID NO: 1371, and SEQ ID NO: 1528; SEQ ID NO: 744, SEQ ID NO: 901, SEQ ID NO: 1058, SEQ ID NO: 1215, SEQ ID NO: 1372, and SEQ ID NO: 1529; SEQ ID NO: 745, SEQ ID NO: 902, SEQ ID NO: 1059, SEQ ID NO: 1216, SEQ ID NO: 1373, and SEQ ID NO: 1530; SEQ ID NO: 746, SEQ ID NO: 903, SEQ ID NO: 1060, SEQ ID NO: 1217, SEQ ID NO: 1374, and SEQ ID NO: 1531; SEQ ID NO: 747, SEQ ID NO: 904, SEQ ID NO: 1061, SEQ ID NO: 1218, SEQ ID NO: 1375, and SEQ ID NO: 1532; SEQ ID NO: 748, SEQ ID NO: 905, SEQ ID NO: 1062, SEQ ID NO: 1219, SEQ ID NO: 1376, and SEQ ID NO: 1533; SEQ ID NO: 749, SEQ ID NO: 906, SEQ ID NO: 1063, SEQ ID NO: 1220, SEQ ID NO: 1377, and SEQ ID NO: 1534; SEQ ID NO: 750, SEQ ID NO: 907, SEQ ID NO: 1064, SEQ ID NO: 1221, SEQ ID NO: 1378, and SEQ ID NO: 1535; SEQ ID NO: 751, SEQ ID NO: 908, SEQ ID NO: 1065, SEQ ID NO: 1222, SEQ ID NO: 1379, and SEQ ID NO: 1536; SEQ ID NO: 752, SEQ ID NO: 909, SEQ ID NO: 1066, SEQ ID NO: 1223, SEQ ID NO: 1380, and SEQ ID NO: 1537; SEQ ID NO: 753, SEQ ID NO: 910, SEQ ID NO: 1067, SEQ ID NO: 1224, SEQ ID NO: 1381, and SEQ ID NO: 1538; SEQ ID NO: 754, SEQ ID NO: 911, SEQ ID NO: 1068, SEQ ID NO: 1225, SEQ ID NO: 1382, and SEQ ID NO: 1539; SEQ ID NO: 755, SEQ ID NO: 912, SEQ ID NO: 1069, SEQ ID NO: 1226, SEQ ID NO: 1383, and SEQ ID NO: 1540; SEQ ID NO: 756, SEQ ID NO: 913, SEQ ID NO: 1070, SEQ ID NO: 1227, SEQ ID NO: 1384, and SEQ ID NO: 1541; SEQ ID NO: 757, SEQ ID NO: 914, SEQ ID NO: 1071, SEQ ID NO: 1228, SEQ ID NO: 1385, and SEQ ID NO: 1542; SEQ ID NO: 758, SEQ ID NO: 915, SEQ ID NO: 1072, SEQ ID NO: 1229, SEQ ID NO: 1386, and SEQ ID NO: 1543; SEQ ID NO: 759, SEQ ID NO: 916, SEQ ID NO: 1073, SEQ ID NO: 1230, SEQ ID NO: 1387, and SEQ ID NO: 1544; SEQ ID NO: 760, SEQ ID NO: 917, SEQ ID NO: 1074, SEQ ID NO: 1231, SEQ ID NO: 1388, and SEQ ID NO: 1545; SEQ ID NO: 761, SEQ ID NO: 918, SEQ ID NO: 1075, SEQ ID NO: 1232, SEQ ID NO: 1389, and SEQ ID NO: 1546; SEQ ID NO: 762, SEQ ID NO: 919, SEQ ID NO: 1076, SEQ ID NO: 1233, SEQ ID NO: 1390, and SEQ ID NO: 1547; SEQ ID NO: 763, SEQ ID NO: 920, SEQ ID NO: 1077, SEQ ID NO: 1234, SEQ ID NO: 1391, and SEQ ID NO: 1548; SEQ ID NO: 764, SEQ ID NO: 921, SEQ ID NO: 1078, SEQ ID NO: 1235, SEQ ID NO: 1392, and SEQ ID NO: 1549; SEQ ID NO: 765, SEQ ID NO: 922, SEQ ID NO: 1079, SEQ ID NO: 1236, SEQ ID NO: 1393, and SEQ ID NO: 1550; SEQ ID NO: 766, SEQ ID NO: 923, SEQ ID NO: 1080, SEQ ID NO: 1237, SEQ ID NO: 1394, and SEQ ID NO: 1551; SEQ ID NO: 767, SEQ ID NO: 924, SEQ ID NO: 1081, SEQ ID NO: 1238, SEQ ID NO: 1395, and SEQ ID NO: 1552; SEQ ID NO: 768, SEQ ID NO: 925, SEQ ID NO: 1082, SEQ ID NO: 1239, SEQ ID NO: 1396, and SEQ ID NO: 1553; SEQ ID NO: 769, SEQ ID NO: 926, SEQ ID NO: 1083, SEQ ID NO: 1240, SEQ ID NO: 1397, and SEQ ID NO: 1554; SEQ ID NO: 770, SEQ ID NO: 927, SEQ ID NO: 1084, SEQ ID NO: 1241, SEQ ID NO: 1398, and SEQ ID NO: 1555; SEQ ID NO: 771, SEQ ID NO: 928, SEQ ID NO: 1085, SEQ ID NO: 1242, SEQ ID NO: 1399, and SEQ ID NO: 1556; SEQ ID NO: 772, SEQ ID NO: 929, SEQ ID NO: 1086, SEQ ID NO: 1243, SEQ ID NO: 1400, and SEQ ID NO: 1557; SEQ ID NO: 773, SEQ ID NO: 930, SEQ ID NO: 1087, SEQ ID NO: 1244, SEQ ID NO: 1401, and SEQ ID NO: 1558; SEQ ID NO: 774, SEQ ID NO: 931, SEQ ID NO: 1088, SEQ ID NO: 1245, SEQ ID NO: 1402, and SEQ ID NO: 1559; SEQ ID NO: 775, SEQ ID NO: 932, SEQ ID NO: 1089, SEQ ID NO: 1246, SEQ ID NO: 1403, and SEQ ID NO: 1560; SEQ ID NO: 776, SEQ ID NO: 933, SEQ ID NO: 1090, SEQ ID NO: 1247, SEQ ID NO: 1404, and SEQ ID NO: 1561; SEQ ID NO: 777, SEQ ID NO: 934, SEQ ID NO: 1091, SEQ ID NO: 1248, SEQ ID NO: 1405, and SEQ ID NO: 1562; SEQ ID NO: 778, SEQ ID NO: 935, SEQ ID NO: 1092, SEQ ID NO: 1249, SEQ ID NO: 1406, and SEQ ID NO: 1563; SEQ ID NO: 779, SEQ ID NO: 936, SEQ ID NO: 1093, SEQ ID NO: 1250, SEQ ID NO: 1407, and SEQ ID NO: 1564; SEQ ID NO: 780, SEQ ID NO: 937, SEQ ID NO: 1094, SEQ ID NO: 1251, SEQ ID NO: 1408, and SEQ ID NO: 1565; SEQ ID NO: 781, SEQ ID NO: 938, SEQ ID NO: 1095, SEQ ID NO: 1252, SEQ ID NO: 1409, and SEQ ID NO: 1566; SEQ ID NO: 782, SEQ ID NO: 939, SEQ ID NO: 1096, SEQ ID NO: 1253, SEQ ID NO: 1410, and SEQ ID NO: 1567; SEQ ID NO: 783, SEQ ID NO: 940, SEQ ID NO: 1097, SEQ ID NO: 1254, SEQ ID NO: 1411, and SEQ ID NO: 1568; SEQ ID NO: 784, SEQ ID NO: 941, SEQ ID NO: 1098, SEQ ID NO: 1255, SEQ ID NO: 1412, and SEQ ID NO: 1569; and SEQ ID NO: 785, SEQ ID NO: 942, SEQ ID NO: 1099, SEQ ID NO: 1256, SEQ ID NO: 1413, and SEQ ID NO: 1570.

[0155] In one embodiment the antibody or fragment thereof comprises a CDRL1, a CDRL2, a CDRL3, a CDRH1, a CDRH2, and a CDRH3 encoded by a polynucleotide. In one embodiment the antibody or fragment thereof comprises a CDRL1 encoded by a polynucleotide sequence selected from the group consisting of SEQ ID NOs: 2199-2355. In one embodiment the antibody or fragment thereof comprises a CDRL2 encoded by a polynucleotide sequence selected from the group consisting of SEQ ID NOs: 2356-2512. In one embodiment the antibody or fragment thereof comprises a CDRL3 encoded by a polynucleotide sequence selected from the group consisting of SEQ ID NOs: 2513-2669. In one embodiment the antibody or fragment thereof comprises a CDRH1 encoded by a polynucleotide sequence selected from the group consisting of SEQ ID NOs: 2700-2826. In one embodiment the antibody or fragment thereof comprises a CDRH2 encoded by a polynucleotide sequence selected from the group consisting of SEQ ID NOs: 2827-2983. In one embodiment the antibody or fragment thereof comprises a CDRH3 encoded by a polynucleotide sequence selected from the group consisting of SEQ ID NOs: 2984-3140. In one embodiment the antibody or fragment thereof comprises a CDRL1, a CDRL2, a CDRL3, a CDRH1, a CDRH2, and a CDRH3, wherein each CDRL1, CDRL2, CDRL3, CDRH1, CDRH2, and CDRH3, respectively, is encoded by a sequence selected from the group consisting of SEQ ID NO: 2199, SEQ ID NO: 2356, SEQ ID NO: 2513, SEQ ID NO: 2670, SEQ ID NO: 2827, and SEQ ID NO: 2984; SEQ ID NO: 2200, SEQ ID NO: 2357, SEQ ID NO: 2514, SEQ ID NO: 2671, SEQ ID NO: 2828, and SEQ ID NO: 2985; SEQ ID NO: 2201, SEQ ID NO: 2358, SEQ ID NO: 2515, SEQ ID NO: 2672, SEQ ID NO: 2829, and SEQ ID NO: 2986; SEQ ID NO: 2202, SEQ ID NO: 2359, SEQ ID NO: 2516, SEQ ID NO: 2673, SEQ ID NO: 2830, and SEQ ID NO: 2987; SEQ ID NO: 2203, SEQ ID NO: 2360, SEQ ID NO: 2517, SEQ ID NO: 2674, SEQ ID NO: 2831, and SEQ ID NO: 2988; SEQ ID NO: 2204, SEQ ID NO: 2361, SEQ ID NO: 2518, SEQ ID NO: 2675, SEQ ID NO: 2832, and SEQ ID NO: 2989; SEQ ID NO: 2205, SEQ ID NO: 2362, SEQ ID NO: 2519, SEQ ID NO: 2676, SEQ ID NO: 2833, and SEQ ID NO: 2990; SEQ ID NO: 2206, SEQ ID NO: 2363, SEQ ID NO: 2520, SEQ ID NO: 2677, SEQ ID NO: 2834, and SEQ ID NO: 2991; SEQ ID NO: 2207, SEQ ID NO: 2364, SEQ ID NO: 2521, SEQ ID NO: 2678, SEQ ID NO: 2835, and SEQ ID NO: 2992; SEQ ID NO: 2208, SEQ ID NO: 2365, SEQ ID NO: 2522, SEQ ID NO: 2679, SEQ ID NO: 2836, and SEQ ID NO: 2993; SEQ ID NO: 2209, SEQ ID NO: 2366, SEQ ID NO: 2523, SEQ ID NO: 2680, SEQ ID NO: 2837, and SEQ ID NO: 2994; SEQ ID NO: 2210, SEQ ID NO: 2367, SEQ ID NO: 2524, SEQ ID NO: 2681, SEQ ID NO: 2838, and SEQ ID NO: 2995; SEQ ID NO: 2211, SEQ ID NO: 2368, SEQ ID NO: 2525, SEQ ID NO: 2682, SEQ ID NO: 2839, and SEQ ID NO: 2996; SEQ ID NO: 2212, SEQ ID NO: 2369, SEQ ID NO: 2526, SEQ ID NO: 2683, SEQ ID NO: 2840, and SEQ ID NO: 2997; SEQ ID NO: 2213, SEQ ID NO: 2370, SEQ ID NO: 2527, SEQ ID NO: 2684, SEQ ID NO: 2841, and SEQ ID NO: 2998; SEQ ID NO: 2214, SEQ ID NO: 2371, SEQ ID NO: 2528, SEQ ID NO: 2685, SEQ ID NO: 2842, and SEQ ID NO: 2999; SEQ ID NO: 2215, SEQ ID NO: 2372, SEQ ID NO: 2529, SEQ ID NO: 2686, SEQ ID NO: 2843, and SEQ ID NO: 3000; SEQ ID NO: 2216, SEQ ID NO: 2373, SEQ ID NO: 2530, SEQ ID NO: 2687, SEQ ID NO: 2844, and SEQ ID NO: 3001; SEQ ID NO: 2217, SEQ ID NO: 2374, SEQ ID NO: 2531, SEQ ID NO: 2688, SEQ ID NO: 2845, and SEQ ID NO: 3002; SEQ ID NO: 2218, SEQ ID NO: 2375, SEQ ID NO: 2532, SEQ ID NO: 2689, SEQ ID NO: 2846, and SEQ ID NO: 3003; SEQ ID NO: 2219, SEQ ID NO: 2376, SEQ ID NO: 2533, SEQ ID NO: 2690, SEQ ID NO: 2847, and SEQ ID NO: 3004; SEQ ID NO: 2220, SEQ ID NO: 2377, SEQ ID NO: 2534, SEQ ID NO: 2691, SEQ ID NO: 2848, and SEQ ID NO: 3005; SEQ ID NO: 2221, SEQ ID NO: 2378, SEQ ID NO: 2535, SEQ ID NO: 2692, SEQ ID NO: 2849, and SEQ ID NO: 3006; SEQ ID NO: 2222, SEQ ID NO: 2379, SEQ ID NO: 2536, SEQ ID NO: 2693, SEQ ID NO: 2850, and SEQ ID NO: 3007; SEQ ID NO: 2223, SEQ ID NO: 2380, SEQ ID NO: 2537, SEQ ID NO: 2694, SEQ ID NO: 2851, and SEQ ID NO: 3008; SEQ ID NO: 2224, SEQ ID NO: 2381, SEQ ID NO: 2538, SEQ ID NO: 2695, SEQ ID NO: 2852, and SEQ ID NO: 3009; SEQ ID NO: 2225, SEQ ID NO: 2382, SEQ ID NO: 2539, SEQ ID NO: 2696, SEQ ID NO: 2853, and SEQ ID NO: 3010; SEQ ID NO: 2226, SEQ ID NO: 2383, SEQ ID NO: 2540, SEQ ID NO: 2697, SEQ ID NO: 2854, and SEQ ID NO: 3011; SEQ ID NO: 2227, SEQ ID NO: 2384, SEQ ID NO: 2541, SEQ ID NO: 2698, SEQ ID NO: 2855, and SEQ ID NO: 3012; SEQ ID NO: 2228, SEQ ID NO: 2385, SEQ ID NO: 2542, SEQ ID NO: 2699, SEQ ID NO: 2856, and SEQ ID NO: 3013; SEQ ID NO: 2229, SEQ ID NO: 2386, SEQ ID NO: 2543, SEQ ID NO: 2700, SEQ ID NO: 2857, and SEQ ID NO: 3014; SEQ ID NO: 2230, SEQ ID NO: 2387, SEQ ID NO: 2544, SEQ ID NO: 2701, SEQ ID NO: 2858, and SEQ ID NO: 3015; SEQ ID NO: 2231, SEQ ID NO: 2388, SEQ ID NO: 2545, SEQ ID NO: 2702, SEQ ID NO: 2859, and SEQ ID NO: 3016; SEQ ID NO: 2232, SEQ ID NO: 2389, SEQ ID NO: 2546, SEQ ID NO: 2703, SEQ ID NO: 2860, and SEQ ID NO: 3017; SEQ ID NO: 2233, SEQ ID NO: 2390, SEQ ID NO: 2547, SEQ ID NO: 2704, SEQ ID NO: 2861, and SEQ ID NO: 3018; SEQ ID NO: 2234, SEQ ID NO: 2391, SEQ ID NO: 2548, SEQ ID NO: 2705, SEQ ID NO: 2862, and SEQ ID NO: 3019; SEQ ID NO: 2235, SEQ ID NO: 2392, SEQ ID NO: 2549, SEQ ID NO: 2706, SEQ ID NO: 2863, and SEQ ID NO: 3020; SEQ ID NO: 2236, SEQ ID NO: 2393, SEQ ID NO: 2550, SEQ ID NO: 2707, SEQ ID NO: 2864, and SEQ ID NO: 3021; SEQ ID NO: 2237, SEQ ID NO: 2394, SEQ ID NO: 2551, SEQ ID NO: 2708, SEQ ID NO: 2865, and SEQ ID NO: 3022; SEQ ID NO: 2238, SEQ ID NO: 2395, SEQ ID NO: 2552, SEQ ID NO: 2709, SEQ ID NO: 2866, and SEQ ID NO: 3023; SEQ ID NO: 2239, SEQ ID NO: 2396, SEQ ID NO: 2553, SEQ ID NO: 2710, SEQ ID NO: 2867, and SEQ ID NO: 3024; SEQ ID NO: 2240, SEQ ID NO: 2397, SEQ ID NO: 2554, SEQ ID NO: 2711, SEQ ID NO: 2868, and SEQ ID NO: 3025; SEQ ID NO: 2241, SEQ ID NO: 2398, SEQ ID NO: 2555, SEQ ID NO: 2712, SEQ ID NO: 2869, and SEQ ID NO: 3026; SEQ ID NO: 2242, SEQ ID NO: 2399, SEQ ID NO: 2556, SEQ ID NO: 2713, SEQ ID NO: 2870, and SEQ ID NO: 3027; SEQ ID NO: 2243, SEQ ID NO: 2400, SEQ ID NO: 2557, SEQ ID NO: 2714, SEQ ID NO: 2871, and SEQ ID NO: 3028; SEQ ID NO: 2244, SEQ ID NO: 2401, SEQ ID NO: 2558, SEQ ID NO: 2715, SEQ ID NO: 2872, and SEQ ID NO: 3029; SEQ ID NO: 2245, SEQ ID NO: 2402, SEQ ID NO: 2559, SEQ ID NO: 2716, SEQ ID NO: 2873, and SEQ ID NO: 3030; SEQ ID NO: 2246, SEQ ID NO: 2403, SEQ ID NO: 2560, SEQ ID NO: 2717, SEQ ID NO: 2874, and SEQ ID NO: 3031; SEQ ID NO: 2247, SEQ ID NO: 2404, SEQ ID NO: 2561, SEQ ID NO: 2718, SEQ ID NO: 2875, and SEQ ID NO: 3032; SEQ ID NO: 2248, SEQ ID NO: 2405, SEQ ID NO: 2562, SEQ ID NO: 2719, SEQ ID NO: 2876, and SEQ ID NO: 3033; SEQ ID NO: 2249, SEQ ID NO: 2406, SEQ ID NO: 2563, SEQ ID NO: 2720, SEQ ID NO: 2877, and SEQ ID NO: 3034; SEQ ID NO: 2250, SEQ ID NO: 2407, SEQ ID NO: 2564, SEQ ID NO: 2721, SEQ ID NO: 2878, and SEQ ID NO: 3035; SEQ ID NO: 2251, SEQ ID NO: 2408, SEQ ID NO: 2565, SEQ ID NO: 2722, SEQ ID NO: 2879, and SEQ ID NO: 3036; SEQ ID NO: 2252, SEQ ID NO: 2409, SEQ ID NO: 2566, SEQ ID NO: 2723, SEQ ID NO: 2880, and SEQ ID NO: 3037; SEQ ID NO: 2253, SEQ ID NO: 2410, SEQ ID NO: 2567, SEQ ID NO: 2724, SEQ ID NO: 2881, and SEQ ID NO: 3038; SEQ ID NO: 2254, SEQ ID NO: 2411, SEQ ID NO: 2568, SEQ ID NO: 2725, SEQ ID NO: 2882, and SEQ ID NO: 3039; SEQ ID NO: 2255, SEQ ID NO: 2412, SEQ ID NO: 2569, SEQ ID NO: 2726, SEQ ID NO: 2883, and SEQ ID NO: 3040; SEQ ID NO: 2256, SEQ ID NO: 2413, SEQ ID NO: 2570, SEQ ID NO: 2727, SEQ ID NO: 2884, and SEQ ID NO: 3041; SEQ ID NO: 2257, SEQ ID NO: 2414, SEQ ID NO: 2571, SEQ ID NO: 2728, SEQ ID NO: 2885, and SEQ ID NO: 3042; SEQ ID NO: 2258, SEQ ID NO: 2415, SEQ ID NO: 2572, SEQ ID NO: 2729, SEQ ID NO: 2886, and SEQ ID NO: 3043; SEQ ID NO: 2259, SEQ ID NO: 2416, SEQ ID NO: 2573, SEQ ID NO: 2730, SEQ ID NO: 2887, and SEQ ID NO: 3044; SEQ ID NO: 2260, SEQ ID NO: 2417, SEQ ID NO: 2574, SEQ ID NO: 2731, SEQ ID NO: 2888, and SEQ ID NO: 3045; SEQ ID NO: 2261, SEQ ID NO: 2418, SEQ ID NO: 2575, SEQ ID NO: 2732, SEQ ID NO: 2889, and SEQ ID NO: 3046; SEQ ID NO: 2262, SEQ ID NO: 2419, SEQ ID NO: 2576, SEQ ID NO: 2733, SEQ ID NO: 2890, and SEQ ID NO: 3047; SEQ ID NO: 2263, SEQ ID NO: 2420, SEQ ID NO: 2577, SEQ ID NO: 2734, SEQ ID NO: 2891, and SEQ ID NO: 3048; SEQ ID NO: 2264, SEQ ID NO: 2421, SEQ ID NO: 2578, SEQ ID NO: 2735, SEQ ID NO: 2892, and SEQ ID NO: 3049; SEQ ID NO: 2265, SEQ ID NO: 2422, SEQ ID NO: 2579, SEQ ID NO: 2736, SEQ ID NO: 2893, and SEQ ID NO: 3050; SEQ ID NO: 2266, SEQ ID NO: 2423, SEQ ID NO: 2580, SEQ ID NO: 2737, SEQ ID NO: 2894, and SEQ ID NO: 3051; SEQ ID NO: 2267, SEQ ID NO: 2424, SEQ ID NO: 2581, SEQ ID NO: 2738, SEQ ID NO: 2895, and SEQ ID NO: 3052; SEQ ID NO: 2268, SEQ ID NO: 2425, SEQ ID NO: 2582, SEQ ID NO: 2739, SEQ ID NO: 2896, and SEQ ID NO: 3053; SEQ ID NO: 2269, SEQ ID NO: 2426, SEQ ID NO: 2583, SEQ ID NO: 2740, SEQ ID NO: 2897, and SEQ ID NO: 3054; SEQ ID NO: 2270, SEQ ID NO: 2427, SEQ ID NO: 2584, SEQ ID NO: 2741, SEQ ID NO: 2898, and SEQ ID NO: 3055; SEQ ID NO: 2271, SEQ ID NO: 2428, SEQ ID NO: 2585, SEQ ID NO: 2742, SEQ ID NO: 2899, and SEQ ID NO: 3056; SEQ ID NO: 2272, SEQ ID NO: 2429, SEQ ID NO: 2586, SEQ ID NO: 2743, SEQ ID NO: 2900, and SEQ ID NO: 3057; SEQ ID NO: 2273, SEQ ID NO: 2430, SEQ ID NO: 2587, SEQ ID NO: 2744, SEQ ID NO: 2901, and SEQ ID NO: 3058; SEQ ID NO: 2274, SEQ ID NO: 2431, SEQ ID NO: 2588, SEQ ID NO: 2745, SEQ ID NO: 2902, and SEQ ID NO: 3059; SEQ ID NO: 2275, SEQ ID NO: 2432, SEQ ID NO: 2589, SEQ ID NO: 2746, SEQ ID NO: 2903, and SEQ ID NO: 3060; SEQ ID NO: 2276, SEQ ID NO: 2433, SEQ ID NO: 2590, SEQ ID NO: 2747, SEQ ID NO: 2904, and SEQ ID NO: 3061; SEQ ID NO: 2277, SEQ ID NO: 2434, SEQ ID NO: 2591, SEQ ID NO: 2748, SEQ ID NO: 2905, and SEQ ID NO: 3062; SEQ ID NO: 2278, SEQ ID NO: 2435, SEQ ID NO: 2592, SEQ ID NO: 2749, SEQ ID NO: 2906, and SEQ ID NO: 3063; SEQ ID NO: 2279, SEQ ID NO: 2436, SEQ ID NO: 2593, SEQ ID NO: 2750, SEQ ID NO: 2907, and SEQ ID NO: 3064; SEQ ID NO: 2280, SEQ ID NO: 2437, SEQ ID NO: 2594, SEQ ID NO: 2751, SEQ ID NO: 2908, and SEQ ID NO: 3065; SEQ ID NO: 2281, SEQ ID NO: 2438, SEQ ID NO: 2595, SEQ ID NO: 2752, SEQ ID NO: 2909, and SEQ ID NO: 3066; SEQ ID NO: 2282, SEQ ID NO: 2439, SEQ ID NO: 2596, SEQ ID NO: 2753, SEQ ID NO: 2910, and SEQ ID NO: 3067; SEQ ID NO: 2283, SEQ ID NO: 2440, SEQ ID NO: 2597, SEQ ID NO: 2754, SEQ ID NO: 2911, and SEQ ID NO: 3068; SEQ ID NO: 2284, SEQ ID NO: 2441, SEQ ID NO: 2598, SEQ ID NO: 2755, SEQ ID NO: 2912, and SEQ ID NO: 3069; SEQ ID NO: 2285, SEQ ID NO: 2442, SEQ ID NO: 2599, SEQ ID NO: 2756, SEQ ID NO: 2913, and SEQ ID NO: 3070; SEQ ID NO: 2286, SEQ ID NO: 2443, SEQ ID NO: 2600, SEQ ID NO: 2757, SEQ ID NO: 2914, and SEQ ID NO: 3071; SEQ ID NO: 2287, SEQ ID NO: 2444, SEQ ID NO: 2601, SEQ ID NO: 2758, SEQ ID NO: 2915, and SEQ ID NO: 3072; SEQ ID NO: 2288, SEQ ID NO: 2445, SEQ ID NO: 2602, SEQ ID NO: 2759, SEQ ID NO: 2916, and SEQ ID NO: 3073; SEQ ID NO: 2289, SEQ ID NO: 2446, SEQ ID NO: 2603, SEQ ID NO: 2760, SEQ ID NO: 2917, and SEQ ID NO: 3074; SEQ ID NO: 2290, SEQ ID NO: 2447, SEQ ID NO: 2604, SEQ ID NO: 2761, SEQ ID NO: 2918, and SEQ ID NO: 3075; SEQ ID NO: 2291, SEQ ID NO: 2448, SEQ ID NO: 2605, SEQ ID NO: 2762, SEQ ID NO: 2919, and SEQ ID NO: 3076; SEQ ID NO: 2292, SEQ ID NO: 2449, SEQ ID NO: 2606, SEQ ID NO: 2763, SEQ ID NO: 2920, and SEQ ID NO: 3077; SEQ ID NO: 2293, SEQ ID NO: 2450, SEQ ID NO: 2607, SEQ ID NO: 2764, SEQ ID NO: 2921, and SEQ ID NO: 3078; SEQ ID NO: 2294, SEQ ID NO: 2451, SEQ ID NO: 2608, SEQ ID NO: 2765, SEQ ID NO: 2922, and SEQ ID NO: 3079; SEQ ID NO: 2295, SEQ ID NO: 2452, SEQ ID NO: 2609, SEQ ID NO: 2766, SEQ ID NO: 2923, and SEQ ID NO: 3080; SEQ ID NO: 2296, SEQ ID NO: 2453, SEQ ID NO: 2610, SEQ ID NO: 2767, SEQ ID NO: 2924, and SEQ ID NO: 3081; SEQ ID NO: 2297, SEQ ID NO: 2454, SEQ ID NO: 2611, SEQ ID NO: 2768, SEQ ID NO: 2925, and SEQ ID NO: 3082; SEQ ID NO: 2298, SEQ ID NO: 2455, SEQ ID NO: 2612, SEQ ID NO: 2769, SEQ ID NO: 2926, and SEQ ID NO: 3083; SEQ ID NO: 2299, SEQ ID NO: 2456, SEQ ID NO: 2613, SEQ ID NO: 2770, SEQ ID NO: 2927, and SEQ ID NO: 3084; SEQ ID NO: 2300, SEQ ID NO: 2457, SEQ ID NO: 2614, SEQ ID NO: 2771, SEQ ID NO: 2928, and SEQ ID NO: 3085; SEQ ID NO: 2301, SEQ ID NO: 2458, SEQ ID NO: 2615, SEQ ID NO: 2772, SEQ ID NO: 2929, and SEQ ID NO: 3086; SEQ ID NO: 2302, SEQ ID NO: 2459, SEQ ID NO: 2616, SEQ ID NO: 2773, SEQ ID NO: 2930, and SEQ ID NO: 3087; SEQ ID NO: 2303, SEQ ID NO: 2460, SEQ ID NO: 2617, SEQ ID NO: 2774, SEQ ID NO: 2931, and SEQ ID NO: 3088; SEQ ID NO: 2304, SEQ ID NO: 2461, SEQ ID NO: 2618, SEQ ID NO: 2775, SEQ ID NO: 2932, and SEQ ID NO: 3089; SEQ ID NO: 2305, SEQ ID NO: 2462, SEQ ID NO: 2619, SEQ ID NO: 2776, SEQ ID NO: 2933, and SEQ ID NO: 3090; SEQ ID NO: 2306, SEQ ID NO: 2463, SEQ ID NO: 2620, SEQ ID NO: 2777, SEQ ID NO: 2934, and SEQ ID NO: 3091; SEQ ID NO: 2307, SEQ ID NO: 2464, SEQ ID NO: 2621, SEQ ID NO: 2778, SEQ ID NO: 2935, and SEQ ID NO: 3092; SEQ ID NO: 2308, SEQ ID NO: 2465, SEQ ID NO: 2622, SEQ ID NO: 2779, SEQ ID NO: 2936, and SEQ ID NO: 3093; SEQ ID NO: 2309, SEQ ID NO: 2466, SEQ ID NO: 2623, SEQ ID NO: 2780, SEQ ID NO: 2937, and SEQ ID NO: 3094; SEQ ID NO: 2310, SEQ ID NO: 2467, SEQ ID NO: 2624, SEQ ID NO: 2781, SEQ ID NO: 2938, and SEQ ID NO: 3095; SEQ ID NO: 2311, SEQ ID NO: 2468, SEQ ID NO: 2625, SEQ ID NO: 2782, SEQ ID NO: 2939, and SEQ ID NO: 3096; SEQ ID NO: 2312, SEQ ID NO: 2469, SEQ ID NO: 2626, SEQ ID NO: 2783, SEQ ID NO: 2940, and SEQ ID NO: 3097; SEQ ID NO: 2313, SEQ ID NO: 2470, SEQ ID NO: 2627, SEQ ID NO: 2784, SEQ ID NO: 2941, and SEQ ID NO: 3098; SEQ ID NO: 2314, SEQ ID NO: 2471, SEQ ID NO: 2628, SEQ ID NO: 2785, SEQ ID NO: 2942, and SEQ ID NO: 3099; SEQ ID NO: 2315, SEQ ID NO: 2472, SEQ ID NO: 2629, SEQ ID NO: 2786, SEQ ID NO: 2943, and SEQ ID NO: 3100; SEQ ID NO: 2316, SEQ ID NO: 2473, SEQ ID NO: 2630, SEQ ID NO: 2787, SEQ ID NO: 2944, and SEQ ID NO: 3101; SEQ ID NO: 2317, SEQ ID NO: 2474, SEQ ID NO: 2631, SEQ ID NO: 2788, SEQ ID NO: 2945, and SEQ ID NO: 3102; SEQ ID NO: 2318, SEQ ID NO: 2475, SEQ ID NO: 2632, SEQ ID NO: 2789, SEQ ID NO: 2946, and SEQ ID NO: 3103; SEQ ID NO: 2319, SEQ ID NO: 2476, SEQ ID NO: 2633, SEQ ID NO: 2790, SEQ ID NO: 2947, and SEQ ID NO: 3104; SEQ ID NO: 2320, SEQ ID NO: 2477, SEQ ID NO: 2634, SEQ ID NO: 2791, SEQ ID NO: 2948, and SEQ ID NO: 3105; SEQ ID NO: 2321, SEQ ID NO: 2478, SEQ ID NO: 2635, SEQ ID NO: 2792, SEQ ID NO: 2949, and SEQ ID NO: 3106; SEQ ID NO: 2322, SEQ ID NO: 2479, SEQ ID NO: 2636, SEQ ID NO: 2793, SEQ ID NO: 2950, and SEQ ID NO: 3107; SEQ ID NO: 2323, SEQ ID NO: 2480, SEQ ID NO: 2637, SEQ ID NO: 2794, SEQ ID NO: 2951, and SEQ ID NO: 3108; SEQ ID NO: 2324, SEQ ID NO: 2481, SEQ ID NO: 2638, SEQ ID NO: 2795, SEQ ID NO: 2952, and SEQ ID NO: 3109; SEQ ID NO: 2325, SEQ ID NO: 2482, SEQ ID NO: 2639, SEQ ID NO: 2796, SEQ ID NO: 2953, and SEQ ID NO: 3110; SEQ ID NO: 2326, SEQ ID NO: 2483, SEQ ID NO: 2640, SEQ ID NO: 2797, SEQ ID NO: 2954, and SEQ ID NO: 3111; SEQ ID NO: 2327, SEQ ID NO: 2484, SEQ ID NO: 2641, SEQ ID NO: 2798, SEQ ID NO: 2955, and SEQ ID NO: 3112; SEQ ID NO: 2328, SEQ ID NO: 2485, SEQ ID NO: 2642, SEQ ID NO: 2799, SEQ ID NO: 2956, and SEQ ID NO: 3113; SEQ ID NO: 2329, SEQ ID NO: 2486, SEQ ID NO: 2643, SEQ ID NO: 2800, SEQ ID NO: 2957, and SEQ ID NO: 3114; SEQ ID NO: 2330, SEQ ID NO: 2487, SEQ ID NO: 2644, SEQ ID NO: 2801, SEQ ID NO: 2958, and SEQ ID NO: 3115; SEQ ID NO: 2331, SEQ ID NO: 2488, SEQ ID NO: 2645, SEQ ID NO: 2802, SEQ ID NO: 2959, and SEQ ID NO: 3116; SEQ ID NO: 2332, SEQ ID NO: 2489, SEQ ID NO: 2646, SEQ ID NO: 2803, SEQ ID NO: 2960, and SEQ ID NO: 3117; SEQ ID NO: 2333, SEQ ID NO: 2490, SEQ ID NO: 2647, SEQ ID NO: 2804, SEQ ID NO: 2961, and SEQ ID NO: 3118; SEQ ID NO: 2334, SEQ ID NO: 2491, SEQ ID NO: 2648, SEQ ID NO: 2805, SEQ ID NO: 2962, and SEQ ID NO: 3119; SEQ ID NO: 2335, SEQ ID NO: 2492, SEQ ID NO: 2649, SEQ ID NO: 2806, SEQ ID NO: 2963, and SEQ ID NO: 3120; SEQ ID NO: 2336, SEQ ID NO: 2493, SEQ ID NO: 2650, SEQ ID NO: 2807, SEQ ID NO: 2964, and SEQ ID NO: 3121; SEQ ID NO: 2337, SEQ ID NO: 2494, SEQ ID NO: 2651, SEQ ID NO: 2808, SEQ ID NO: 2965, and SEQ ID NO: 3122; SEQ ID NO: 2338, SEQ ID NO: 2495, SEQ ID NO: 2652, SEQ ID NO: 2809, SEQ ID NO: 2966, and SEQ ID NO: 3123; SEQ ID NO: 2339, SEQ ID NO: 2496, SEQ ID NO: 2653, SEQ ID NO: 2810, SEQ ID NO: 2967, and SEQ ID NO: 3124; SEQ ID NO: 2340, SEQ ID NO: 2497, SEQ ID NO: 2654, SEQ ID NO: 2811, SEQ ID NO: 2968, and SEQ ID NO: 3125; SEQ ID NO: 2341, SEQ ID NO: 2498, SEQ ID NO: 2655, SEQ ID NO: 2812, SEQ ID NO: 2969, and SEQ ID NO: 3126; SEQ ID NO: 2342, SEQ ID NO: 2499, SEQ ID NO: 2656, SEQ ID NO: 2813, SEQ ID NO: 2970, and SEQ ID NO: 3127; SEQ ID NO: 2343, SEQ ID NO: 2500, SEQ ID NO: 2657, SEQ ID NO: 2814, SEQ ID NO: 2971, and SEQ ID NO: 3128; SEQ ID NO: 2344, SEQ ID NO: 2501, SEQ ID NO: 2658, SEQ ID NO: 2815, SEQ ID NO: 2972, and SEQ ID NO: 3129; SEQ ID NO: 2345, SEQ ID NO: 2502, SEQ ID NO: 2659, SEQ ID NO: 2816, SEQ ID NO: 2973, and SEQ ID NO: 3130; SEQ ID NO: 2346, SEQ ID NO: 2503, SEQ ID NO: 2660, SEQ ID NO: 2817, SEQ ID NO: 2974, and SEQ ID NO: 3131; SEQ ID NO: 2347, SEQ ID NO: 2504, SEQ ID NO: 2661, SEQ ID NO: 2818, SEQ ID NO: 2975, and SEQ ID NO: 3132; SEQ ID NO: 2348, SEQ ID NO: 2505, SEQ ID NO: 2662, SEQ ID NO: 2819, SEQ ID NO: 2976, and SEQ ID NO: 3133; SEQ ID NO: 2349, SEQ ID NO: 2506, SEQ ID NO: 2663, SEQ ID NO: 2820, SEQ ID NO: 2977, and SEQ ID NO: 3134; SEQ ID NO: 2350, SEQ ID NO: 2507, SEQ ID NO: 2664, SEQ ID NO: 2821, SEQ ID NO: 2978, and SEQ ID NO: 3135; SEQ ID NO: 2351, SEQ ID NO: 2508, SEQ ID NO: 2665, SEQ ID NO: 2822, SEQ ID NO: 2979, and SEQ ID NO: 3136; SEQ ID NO: 2352, SEQ ID NO: 2509, SEQ ID NO: 2666, SEQ ID NO: 2823, SEQ ID NO: 2980, and SEQ ID NO: 3137; SEQ ID NO: 2353, SEQ ID NO: 2510, SEQ ID NO: 2667, SEQ ID NO: 2824, SEQ ID NO: 2981, and SEQ ID NO: 3138; SEQ ID NO: 2354, SEQ ID NO: 2511, SEQ ID NO: 2668, SEQ ID NO: 2825, SEQ ID NO: 2982, and SEQ ID NO: 3139; and SEQ ID NO: 2355, SEQ ID NO: 2512, SEQ ID NO: 2669, SEQ ID NO: 2826, SEQ ID NO: 2983, and SEQ ID NO: 3140.

[0156] In another aspect, an antigen binding protein includes 1, 2, 3, 4, 5, or 6 variant forms of the CDRs listed in TABLES 4A and 4B or TABLES 9A and 9B, each having at least 80%, 85%, 90%, 95%, 96%, 97%, 98%, or 99% sequence identity to a CDR sequence listed in TABLES 4A and 4B and TABLES 9A and 9B. Some antigen binding proteins include 1, 2, 3, 4, 5, or 6 of the CDRs listed in TABLES 4A and 4B or TABLEs 9A and 9B, each or collectively differing by no more than 1, 2, 3, 4 or 5 amino acids from the CDRs listed in this table.

[0157] In various other embodiments, the antigen binding protein is derived from such antibodies. For instance, in one aspect, the antigen binding protein comprises 1, 2, 3, 4, 5 or all 6 of the CDRs listed in one of the rows for any particular antibody listed in TABLES 4A and 4B and TABLES 9A and 9B. In another aspect, an antigen binding protein includes 1, 2, 3, 4, 5, or 6 variant forms of the CDRs listed in one of the rows for an antibody in TABLES 4A and 4B and TABLES 9A and 9B, each CDR having at least 80%, 85%, 90%, 95%, 96%, 97%, 98%, or 99% sequence identity to a CDR sequence listed in TABLES 4A and 4B and TABLES 9A and 9B. Some antigen binding proteins include 1, 2, 3, 4, 5, or 6 of the CDRs listed in one of the rows of TABLES 4A and 4B and TABLES 9A and 9B, each differing by no more than 1, 2, 3, 4 or 5 amino acids from the CDRs listed in these tables. In another aspect, the antigen binding protein comprises all 6 of the CDRS listed in a row of TABLES 4A and 4B and TABLES 9A and 9B and the total number of amino acid changes to the CDRs collectively is no more than 1, 2, 3, 4, or 5 amino acids.

[0158] In one embodiment the antibody or fragment thereof comprises a light chain comprising a sequence selected from the group consisting of SEQ ID NOs: 472-628. In one embodiment the antibody or fragment thereof comprises a heavy chain comprising a sequence selected from the group consisting of SEQ ID NOs: 472-628. In one embodiment the antibody or fragment thereof comprises a light chain comprising a sequence selected from the group consisting of SEQ ID NOs: 472-628 and a heavy chain comprising a sequence selected from the group consisting of SEQ ID NOs: 472-628. In one embodiment the antibody or fragment thereof comprises a combination of a light chain and a heavy chain selected from the group consisting of a light chain comprising SEQ ID NO: 315 and a heavy chain comprising SEQ ID NO: 472; a light chain comprising SEQ ID NO: 316 and a heavy chain comprising SEQ ID NO: 473; a light chain comprising SEQ ID NO: 317 and a heavy chain comprising SEQ ID NO: 474; a light chain comprising SEQ ID NO: 318 and a heavy chain comprising SEQ ID NO: 475; a light chain comprising SEQ ID NO: 319 and a heavy chain comprising SEQ ID NO: 476; a light chain comprising SEQ ID NO: 320 and a heavy chain comprising SEQ ID NO: 477; a light chain comprising SEQ ID NO: 321 and a heavy chain comprising SEQ ID NO: 478; a light chain comprising SEQ ID NO: 322 and a heavy chain comprising SEQ ID NO: 479; a light chain comprising SEQ ID NO: 323 and a heavy chain comprising SEQ ID NO: 480; a light chain comprising SEQ ID NO: 324 and a heavy chain comprising SEQ ID NO: 481; a light chain comprising SEQ ID NO: 325 and a heavy chain comprising SEQ ID NO: 482; a light chain comprising SEQ ID NO: 326 and a heavy chain comprising SEQ ID NO: 483; a light chain comprising SEQ ID NO: 327 and a heavy chain comprising SEQ ID NO: 484; a light chain comprising SEQ ID NO: 328 and a heavy chain comprising SEQ ID NO: 485; a light chain comprising SEQ ID NO: 329 and a heavy chain comprising SEQ ID NO: 486; a light chain comprising SEQ ID NO: 330 and a heavy chain comprising SEQ ID NO: 487; a light chain comprising SEQ ID NO: 331 and a heavy chain comprising SEQ ID NO: 488; a light chain comprising SEQ ID NO: 332 and a heavy chain comprising SEQ ID NO: 489; a light chain comprising SEQ ID NO: 333 and a heavy chain comprising SEQ ID NO: 490; a light chain comprising SEQ ID NO: 334 and a heavy chain comprising SEQ ID NO: 491; a light chain comprising SEQ ID NO: 335 and a heavy chain comprising SEQ ID NO: 492; a light chain comprising SEQ ID NO: 336 and a heavy chain comprising SEQ ID NO: 493; a light chain comprising SEQ ID NO: 337 and a heavy chain comprising SEQ ID NO: 494; a light chain comprising SEQ ID NO: 338 and a heavy chain comprising SEQ ID NO: 495; a light chain comprising SEQ ID NO: 339 and a heavy chain comprising SEQ ID NO: 496; a light chain comprising SEQ ID NO: 340 and a heavy chain comprising SEQ ID NO: 497; a light chain comprising SEQ ID NO: 341 and a heavy chain comprising SEQ ID NO: 498; a light chain comprising SEQ ID NO: 342 and a heavy chain comprising SEQ ID NO: 499; a light chain comprising SEQ ID NO: 343 and a heavy chain comprising SEQ ID NO: 500; a light chain comprising SEQ ID NO: 344 and a heavy chain comprising SEQ ID NO: 501; a light chain comprising SEQ ID NO: 345 and a heavy chain comprising SEQ ID NO: 502; a light chain comprising SEQ ID NO: 346 and a heavy chain comprising SEQ ID NO: 503; a light chain comprising SEQ ID NO: 347 and a heavy chain comprising SEQ ID NO: 504; a light chain comprising SEQ ID NO: 348 and a heavy chain comprising SEQ ID NO: 505; a light chain comprising SEQ ID NO: 349 and a heavy chain comprising SEQ ID NO: 506; a light chain comprising SEQ ID NO: 350 and a heavy chain comprising SEQ ID NO: 507; a light chain comprising SEQ ID NO: 351 and a heavy chain comprising SEQ ID NO: 508; a light chain comprising SEQ ID NO: 352 and a heavy chain comprising SEQ ID NO: 509; a light chain comprising SEQ ID NO: 353 and a heavy chain comprising SEQ ID NO: 510; a light chain comprising SEQ ID NO: 354 and a heavy chain comprising SEQ ID NO: 511; a light chain comprising SEQ ID NO: 355 and a heavy chain comprising SEQ ID NO: 512; a light chain comprising SEQ ID NO: 356 and a heavy chain comprising SEQ ID NO: 513; a light chain comprising SEQ ID NO: 357 and a heavy chain comprising SEQ ID NO: 514; a light chain comprising SEQ ID NO: 358 and a heavy chain comprising SEQ ID NO: 515; a light chain comprising SEQ ID NO: 359 and a heavy chain comprising SEQ ID NO: 516; a light chain comprising SEQ ID NO: 360 and a heavy chain comprising SEQ ID NO: 517; a light chain comprising SEQ ID NO: 361 and a heavy chain comprising SEQ ID NO: 518; a light chain comprising SEQ ID NO: 362 and a heavy chain comprising SEQ ID NO: 519; a light chain comprising SEQ ID NO: 363 and a heavy chain comprising SEQ ID NO: 520; a light chain comprising SEQ ID NO: 364 and a heavy chain comprising SEQ ID NO: 521; a light chain comprising SEQ ID NO: 365 and a heavy chain comprising SEQ ID NO: 522; a light chain comprising SEQ ID NO: 366 and a heavy chain comprising SEQ ID NO: 523; a light chain comprising SEQ ID NO: 367 and a heavy chain comprising SEQ ID NO: 524; a light chain comprising SEQ ID NO: 368 and a heavy chain comprising SEQ ID NO: 525; a light chain comprising SEQ ID NO: 369 and a heavy chain comprising SEQ ID NO: 526; a light chain comprising SEQ ID NO: 370 and a heavy chain comprising SEQ ID NO: 527; a light chain comprising SEQ ID NO: 371 and a heavy chain comprising SEQ ID NO: 528; a light chain comprising SEQ ID NO: 372 and a heavy chain comprising SEQ ID NO: 529; a light chain comprising SEQ ID NO: 373 and a heavy chain comprising SEQ ID NO: 530; a light chain comprising SEQ ID NO: 374 and a heavy chain comprising SEQ ID NO: 531; a light chain comprising SEQ ID NO: 375 and a heavy chain comprising SEQ ID NO: 532; a light chain comprising SEQ ID NO: 376 and a heavy chain comprising SEQ ID NO: 533; a light chain comprising SEQ ID NO: 377 and a heavy chain comprising SEQ ID NO: 534; a light chain comprising SEQ ID NO: 378 and a heavy chain comprising SEQ ID NO: 535; a light chain comprising SEQ ID NO: 379 and a heavy chain comprising SEQ ID NO: 536; a light chain comprising SEQ ID NO: 380 and a heavy chain comprising SEQ ID NO: 537; a light chain comprising SEQ ID NO: 381 and a heavy chain comprising SEQ ID NO: 538; a light chain comprising SEQ ID NO: 382 and a heavy chain comprising SEQ ID NO: 539; a light chain comprising SEQ ID NO: 383 and a heavy chain comprising SEQ ID NO: 540; a light chain comprising SEQ ID NO: 384 and a heavy chain comprising SEQ ID NO: 541; a light chain comprising SEQ ID NO: 385 and a heavy chain comprising SEQ ID NO: 542; a light chain comprising SEQ ID NO: 386 and a heavy chain comprising SEQ ID NO: 543; a light chain comprising SEQ ID NO: 387 and a heavy chain comprising SEQ ID NO: 544; a light chain comprising SEQ ID NO: 388 and a heavy chain comprising SEQ ID NO: 545; a light chain comprising SEQ ID NO: 389 and a heavy chain comprising SEQ ID NO: 546; a light chain comprising SEQ ID NO: 390 and a heavy chain comprising SEQ ID NO: 547; a light chain comprising SEQ ID NO: 391 and a heavy chain comprising SEQ ID NO: 548; a light chain comprising SEQ ID NO: 392 and a heavy chain comprising SEQ ID NO: 549; a light chain comprising SEQ ID NO: 393 and a heavy chain comprising SEQ ID NO: 550; a light chain comprising SEQ ID NO: 394 and a heavy chain comprising SEQ ID NO: 551; a light chain comprising SEQ ID NO: 395 and a heavy chain comprising SEQ ID NO: 552; a light chain comprising SEQ ID NO: 396 and a heavy chain comprising SEQ ID NO: 553; a light chain comprising SEQ ID NO: 397 and a heavy chain comprising SEQ ID NO: 554; a light chain comprising SEQ ID NO: 398 and a heavy chain comprising SEQ ID NO: 555; a light chain comprising SEQ ID NO: 399 and a heavy chain comprising SEQ ID NO: 556; a light chain comprising SEQ ID NO: 400 and a heavy chain comprising SEQ ID NO: 557; a light chain comprising SEQ ID NO: 401 and a heavy chain comprising SEQ ID NO: 558; a light chain comprising SEQ ID NO: 402 and a heavy chain comprising SEQ ID NO: 559; a light chain comprising SEQ ID NO: 403 and a heavy chain comprising SEQ ID NO: 560; a light chain comprising SEQ ID NO: 404 and a heavy chain comprising SEQ ID NO: 561; a light chain comprising SEQ ID NO: 405 and a heavy chain comprising SEQ ID NO: 562; a light chain comprising SEQ ID NO: 406 and a heavy chain comprising SEQ ID NO: 563; a light chain comprising SEQ ID NO: 407 and a heavy chain comprising SEQ ID NO: 564; a light chain comprising SEQ ID NO: 408 and a heavy chain comprising SEQ ID NO: 565; a light chain comprising SEQ ID NO: 409 and a heavy chain comprising SEQ ID NO: 566; a light chain comprising SEQ ID NO: 410 and a heavy chain comprising SEQ ID NO: 567; a light chain comprising SEQ ID NO: 411 and a heavy chain comprising SEQ ID NO: 568; a light chain comprising SEQ ID NO: 412 and a heavy chain comprising SEQ ID NO: 569; a light chain comprising SEQ ID NO: 413 and a heavy chain comprising SEQ ID NO: 570; a light chain comprising SEQ ID NO: 414 and a heavy chain comprising SEQ ID NO: 571; a light chain comprising SEQ ID NO: 415 and a heavy chain comprising SEQ ID NO: 572; a light chain comprising SEQ ID NO: 416 and a heavy chain comprising SEQ ID NO: 573; a light chain comprising SEQ ID NO: 417 and a heavy chain comprising SEQ ID NO: 574; a light chain comprising SEQ ID NO: 418 and a heavy chain comprising SEQ ID NO: 575; a light chain comprising SEQ ID NO: 419 and a heavy chain comprising SEQ ID NO: 576; a light chain comprising SEQ ID NO: 420 and a heavy chain comprising SEQ ID NO: 577; a light chain comprising SEQ ID NO: 421 and a heavy chain comprising SEQ ID NO: 578; a light chain comprising SEQ ID NO: 422 and a heavy chain comprising SEQ ID NO: 579; a light chain comprising SEQ ID NO: 423 and a heavy chain comprising SEQ ID NO: 580; a light chain comprising SEQ ID NO: 424 and a heavy chain comprising SEQ ID NO: 581; a light chain comprising SEQ ID NO: 425 and a heavy chain comprising SEQ ID NO: 582; a light chain comprising SEQ ID NO: 426 and a heavy chain comprising SEQ ID NO: 583; a light chain comprising SEQ ID NO: 427 and a heavy chain comprising SEQ ID NO: 584; a light chain comprising SEQ ID NO: 428 and a heavy chain comprising SEQ ID NO: 585; a light chain comprising SEQ ID NO: 429 and a heavy chain comprising SEQ ID NO: 586; a light chain comprising SEQ ID NO: 430 and a heavy chain comprising SEQ ID NO: 587; a light chain comprising SEQ ID NO: 431 and a heavy chain comprising SEQ ID NO: 588; a light chain comprising SEQ ID NO: 432 and a heavy chain comprising SEQ ID NO: 589; a light chain comprising SEQ ID NO: 433 and a heavy chain comprising SEQ ID NO: 590; a light chain comprising SEQ ID NO: 434 and a heavy chain comprising SEQ ID NO: 591; a light chain comprising SEQ ID NO: 435 and a heavy chain comprising SEQ ID NO: 592; a light chain comprising SEQ ID NO: 436 and a heavy chain comprising SEQ ID NO: 593; a light chain comprising SEQ ID NO: 437 and a heavy chain comprising SEQ ID NO: 594; a light chain comprising SEQ ID NO: 438 and a heavy chain comprising SEQ ID NO: 595; a light chain comprising SEQ ID NO: 439 and a heavy chain comprising SEQ ID NO: 596; a light chain comprising SEQ ID NO: 440 and a heavy chain comprising SEQ ID NO: 597; a light chain comprising SEQ ID NO: 441 and a heavy chain comprising SEQ ID NO: 598; a light chain comprising SEQ ID NO: 442 and a heavy chain comprising SEQ ID NO: 599; a light chain comprising SEQ ID NO: 443 and a heavy chain comprising SEQ ID NO: 600; a light chain comprising SEQ ID NO: 444 and a heavy chain comprising SEQ ID NO: 601; a light chain comprising SEQ ID NO: 445 and a heavy chain comprising SEQ ID NO: 602; a light chain comprising SEQ ID NO: 446 and a heavy chain comprising SEQ ID NO: 603; a light chain comprising SEQ ID NO: 447 and a heavy chain comprising SEQ ID NO: 604; a light chain comprising SEQ ID NO: 448 and a heavy chain comprising SEQ ID NO: 605; a light chain comprising SEQ ID NO: 449 and a heavy chain comprising SEQ ID NO: 606; a light chain comprising SEQ ID NO: 450 and a heavy chain comprising SEQ ID NO: 607; a light chain comprising SEQ ID NO: 451 and a heavy chain comprising SEQ ID NO: 608; a light chain comprising SEQ ID NO: 452 and a heavy chain comprising SEQ ID NO: 609; a light chain comprising SEQ ID NO: 453 and a heavy chain comprising SEQ ID NO: 610; a light chain comprising SEQ ID NO: 454 and a heavy chain comprising SEQ ID NO: 611; a light chain comprising SEQ ID NO: 455 and a heavy chain comprising SEQ ID NO: 612; a light chain comprising SEQ ID NO: 456 and a heavy chain comprising SEQ ID NO: 613; a light chain comprising SEQ ID NO: 457 and a heavy chain comprising SEQ ID NO: 614; a light chain comprising SEQ ID NO: 458 and a heavy chain comprising SEQ ID NO: 615; a light chain comprising SEQ ID NO: 459 and a heavy chain comprising SEQ ID NO: 616; a light chain comprising SEQ ID NO: 460 and a heavy chain comprising SEQ ID NO: 617; a light chain comprising SEQ ID NO: 461 and a heavy chain comprising SEQ ID NO: 618; a light chain comprising SEQ ID NO: 462 and a heavy chain comprising SEQ ID NO: 619; a light chain comprising SEQ ID NO: 463 and a heavy chain comprising SEQ ID NO: 620; a light chain comprising SEQ ID NO: 464 and a heavy chain comprising SEQ ID NO: 621; a light chain comprising SEQ ID NO: 465 and a heavy chain comprising SEQ ID NO: 622; a light chain comprising SEQ ID NO: 466 and a heavy chain comprising SEQ ID NO: 623; a light chain comprising SEQ ID NO: 467 and a heavy chain comprising SEQ ID NO: 624; a light chain comprising SEQ ID NO: 468 and a heavy chain comprising SEQ ID NO: 625; a light chain comprising SEQ ID NO: 469 and a heavy chain comprising SEQ ID NO: 626; a light chain comprising SEQ ID NO: 470 and a heavy chain comprising SEQ ID NO: 627; and a light chain comprising SEQ ID NO: 471 and a heavy chain comprising SEQ ID NO: 628.

[0159] In one embodiment the antibody or fragment thereof comprises a light chain encoded by a polynucleotide sequence selected from the group consisting of SEQ ID NOs: 1885-2014. In one embodiment the antibody or fragment thereof comprises a heavy chain encoded by a polynucleotide sequence selected from the group consisting of SEQ ID NOs: 2042-2198. In one embodiment the antibody or fragment thereof comprises a light chain encoded by a polynucleotide sequence selected from the group consisting of SEQ ID NOs: 1885-2014 and a heavy chain comprising a sequence selected from the group consisting of SEQ ID NOs: 2042-2198. In one embodiment the antibody or fragment thereof comprises a combination of light chain variable region and a heavy chain variable region selected from the group consisting of a light chain encoded by a polynucleotide sequence comprising SEQ ID NO: 1885 and a heavy chain encoded by a polynucleotide sequence comprising SEQ ID NO: 2042; a light chain encoded by a polynucleotide sequence comprising SEQ ID NO: 1886 and a heavy chain encoded by a polynucleotide sequence comprising SEQ ID NO: 2043; a light chain encoded by a polynucleotide sequence comprising SEQ ID NO: 1887 and a heavy chain encoded by a polynucleotide sequence comprising SEQ ID NO: 2044; a light chain encoded by a polynucleotide sequence comprising SEQ ID NO: 1888 and a heavy chain encoded by a polynucleotide sequence comprising SEQ ID NO: 2045; a light chain encoded by a polynucleotide sequence comprising SEQ ID NO: 1889 and a heavy chain encoded by a polynucleotide sequence comprising SEQ ID NO: 2046; a light chain encoded by a polynucleotide sequence comprising SEQ ID NO: 1890 and a heavy chain encoded by a polynucleotide sequence comprising SEQ ID NO: 2047; a light chain encoded by a polynucleotide sequence comprising SEQ ID NO: 1891 and a heavy chain encoded by a polynucleotide sequence comprising SEQ ID NO: 2048; a light chain encoded by a polynucleotide sequence comprising SEQ ID NO: 1892 and a heavy chain encoded by a polynucleotide sequence comprising SEQ ID NO: 2049; a light chain encoded by a polynucleotide sequence comprising SEQ ID NO: 1893 and a heavy chain encoded by a polynucleotide sequence comprising SEQ ID NO: 2050; a light chain encoded by a polynucleotide sequence comprising SEQ ID NO: 1894 and a heavy chain encoded by a polynucleotide sequence comprising SEQ ID NO: 2051; a light chain encoded by a polynucleotide sequence comprising SEQ ID NO: 1895 and a heavy chain encoded by a polynucleotide sequence comprising SEQ ID NO: 2052; a light chain encoded by a polynucleotide sequence comprising SEQ ID NO: 1896 and a heavy chain encoded by a polynucleotide sequence comprising SEQ ID NO: 2053; a light chain encoded by a polynucleotide sequence comprising SEQ ID NO: 1897 and a heavy chain encoded by a polynucleotide sequence comprising SEQ ID NO: 2054; a light chain encoded by a polynucleotide sequence comprising SEQ ID NO: 1898 and a heavy chain encoded by a polynucleotide sequence comprising SEQ ID NO: 2055; a light chain encoded by a polynucleotide sequence comprising SEQ ID NO: 1899 and a heavy chain encoded by a polynucleotide sequence comprising SEQ ID NO: 2056; a light chain encoded by a polynucleotide sequence comprising SEQ ID NO: 1900 and a heavy chain encoded by a polynucleotide sequence comprising SEQ ID NO: 2057; a light chain encoded by a polynucleotide sequence comprising SEQ ID NO: 1901 and a heavy chain encoded by a polynucleotide sequence comprising SEQ ID NO: 2058; a light chain encoded by a polynucleotide sequence comprising SEQ ID NO: 1902 and a heavy chain encoded by a polynucleotide sequence comprising SEQ ID NO: 2059; a light chain encoded by a polynucleotide sequence comprising SEQ ID NO: 1903 and a heavy chain encoded by a polynucleotide sequence comprising SEQ ID NO: 2060; a light chain encoded by a polynucleotide sequence comprising SEQ ID NO: 1904 and a heavy chain encoded by a polynucleotide sequence comprising SEQ ID NO: 2061; a light chain encoded by a polynucleotide sequence comprising SEQ ID NO: 1905 and a heavy chain encoded by a polynucleotide sequence comprising SEQ ID NO: 2062; a light chain encoded by a polynucleotide sequence comprising SEQ ID NO: 1906 and a heavy chain encoded by a polynucleotide sequence comprising SEQ ID NO: 2063; a light chain encoded by a polynucleotide sequence comprising SEQ ID NO: 1907 and a heavy chain encoded by a polynucleotide sequence comprising SEQ ID NO: 2064; a light chain encoded by a polynucleotide sequence comprising SEQ ID NO: 1908 and a heavy chain encoded by a polynucleotide sequence comprising SEQ ID NO: 2065; a light chain encoded by a polynucleotide sequence comprising SEQ ID NO: 1909 and a heavy chain encoded by a polynucleotide sequence comprising SEQ ID NO: 2066; a light chain encoded by a polynucleotide sequence comprising SEQ ID NO: 1910 and a heavy chain encoded by a polynucleotide sequence comprising SEQ ID NO: 2067; a light chain encoded by a polynucleotide sequence comprising SEQ ID NO: 1911 and a heavy chain encoded by a polynucleotide sequence comprising SEQ ID NO: 2068; a light chain encoded by a polynucleotide sequence comprising SEQ ID NO: 1912 and a heavy chain encoded by a polynucleotide sequence comprising SEQ ID NO: 2069; a light chain encoded by a polynucleotide sequence comprising SEQ ID NO: 1913 and a heavy chain encoded by a polynucleotide sequence comprising SEQ ID NO: 2070; a light chain encoded by a polynucleotide sequence comprising SEQ ID NO: 1914 and a heavy chain encoded by a polynucleotide sequence comprising SEQ ID NO: 2071; a light chain encoded by a polynucleotide sequence comprising SEQ ID NO: 1915 and a heavy chain encoded by a polynucleotide sequence comprising SEQ ID NO: 2072; a light chain encoded by a polynucleotide sequence comprising SEQ ID NO: 1916 and a heavy chain encoded by a polynucleotide sequence comprising SEQ ID NO: 2073; a light chain encoded by a polynucleotide sequence comprising SEQ ID NO: 1917 and a heavy chain encoded by a polynucleotide sequence comprising SEQ ID NO: 2074; a light chain encoded by a polynucleotide sequence comprising SEQ ID NO: 1918 and a heavy chain encoded by a polynucleotide sequence comprising SEQ ID NO: 2075; a light chain encoded by a polynucleotide sequence comprising SEQ ID NO: 1919 and a heavy chain encoded by a polynucleotide sequence comprising SEQ ID NO: 2076; a light chain encoded by a polynucleotide sequence comprising SEQ ID NO: 1920 and a heavy chain encoded by a polynucleotide sequence comprising SEQ ID NO: 2077; a light chain encoded by a polynucleotide sequence comprising SEQ ID NO: 1921 and a heavy chain encoded by a polynucleotide sequence comprising SEQ ID NO: 2078; a light chain encoded by a polynucleotide sequence comprising SEQ ID NO: 1922 and a heavy chain encoded by a polynucleotide sequence comprising SEQ ID NO: 2079; a light chain encoded by a polynucleotide sequence comprising SEQ ID NO: 1923 and a heavy chain encoded by a polynucleotide sequence comprising SEQ ID NO: 2080; a light chain encoded by a polynucleotide sequence comprising SEQ ID NO: 1924 and a heavy chain encoded by a polynucleotide sequence comprising SEQ ID NO: 2081; a light chain encoded by a polynucleotide sequence comprising SEQ ID NO: 1925 and a heavy chain encoded by a polynucleotide sequence comprising SEQ ID NO: 2082; a light chain encoded by a polynucleotide sequence comprising SEQ ID NO: 1926 and a heavy chain encoded by a polynucleotide sequence comprising SEQ ID NO: 2083; a light chain encoded by a polynucleotide sequence comprising SEQ ID NO: 1927 and a heavy chain encoded by a polynucleotide sequence comprising SEQ ID NO: 2084; a light chain encoded by a polynucleotide sequence comprising SEQ ID NO: 1928 and a heavy chain encoded by a polynucleotide sequence comprising SEQ ID NO: 2085; a light chain encoded by a polynucleotide sequence comprising SEQ ID NO: 1929 and a heavy chain encoded by a polynucleotide sequence comprising SEQ ID NO: 2086; a light chain encoded by a polynucleotide sequence comprising SEQ ID NO: 1930 and a heavy chain encoded by a polynucleotide sequence comprising SEQ ID NO: 2087; a light chain encoded by a polynucleotide sequence comprising SEQ ID NO: 1931 and a heavy chain encoded by a polynucleotide sequence comprising SEQ ID NO: 2088; a light chain encoded by a polynucleotide sequence comprising SEQ ID NO: 1932 and a heavy chain encoded by a polynucleotide sequence comprising SEQ ID NO: 2089; a light chain encoded by a polynucleotide sequence comprising SEQ ID NO: 1933 and a heavy chain encoded by a polynucleotide sequence comprising SEQ ID NO: 2090; a light chain encoded by a polynucleotide sequence comprising SEQ ID NO: 1934 and a heavy chain encoded by a polynucleotide sequence comprising SEQ ID NO: 2091; a light chain encoded by a polynucleotide sequence comprising SEQ ID NO: 1935 and a heavy chain encoded by a polynucleotide sequence comprising SEQ ID NO: 2092; a light chain encoded by a polynucleotide sequence comprising SEQ ID NO: 1936 and a heavy chain encoded by a polynucleotide sequence comprising SEQ ID NO: 2093; a light chain encoded by a polynucleotide sequence comprising SEQ ID NO: 1937 and a heavy chain encoded by a polynucleotide sequence comprising SEQ ID NO: 2094; a light chain encoded by a polynucleotide sequence comprising SEQ ID NO: 1938 and a heavy chain encoded by a polynucleotide sequence comprising SEQ ID NO: 2095; a light chain encoded by a polynucleotide sequence comprising SEQ ID NO: 1939 and a heavy chain encoded by a polynucleotide sequence comprising SEQ ID NO: 2096; a light chain encoded by a polynucleotide sequence comprising SEQ ID NO: 1940 and a heavy chain encoded by a polynucleotide sequence comprising SEQ ID NO: 2097; a light chain encoded by a polynucleotide sequence comprising SEQ ID NO: 1941 and a heavy chain encoded by a polynucleotide sequence comprising SEQ ID NO: 2098; a light chain encoded by a polynucleotide sequence comprising SEQ ID NO: 1942 and a heavy chain encoded by a polynucleotide sequence comprising SEQ ID NO: 2099; a light chain encoded by a polynucleotide sequence comprising SEQ ID NO: 1943 and a heavy chain encoded by a polynucleotide sequence comprising SEQ ID NO: 2100; a light chain encoded by a polynucleotide sequence comprising SEQ ID NO: 1944 and a heavy chain encoded by a polynucleotide sequence comprising SEQ ID NO: 2101; a light chain encoded by a polynucleotide sequence comprising SEQ ID NO: 1945 and a heavy chain encoded by a polynucleotide sequence comprising SEQ ID NO: 2102; a light chain encoded by a polynucleotide sequence comprising SEQ ID NO: 1946 and a heavy chain encoded by a polynucleotide sequence comprising SEQ ID NO: 2103; a light chain encoded by a polynucleotide sequence comprising SEQ ID NO: 1947 and a heavy chain encoded by a polynucleotide sequence comprising SEQ ID NO: 2104; a light chain encoded by a polynucleotide sequence comprising SEQ ID NO: 1948 and a heavy chain encoded by a polynucleotide sequence comprising SEQ ID NO: 2105; a light chain encoded by a polynucleotide sequence comprising SEQ ID NO: 1949 and a heavy chain encoded by a polynucleotide sequence comprising SEQ ID NO: 2106; a light chain encoded by a polynucleotide sequence comprising SEQ ID NO: 1950 and a heavy chain encoded by a polynucleotide sequence comprising SEQ ID NO: 2107; a light chain encoded by a polynucleotide sequence comprising SEQ ID NO: 1951 and a heavy chain encoded by a polynucleotide sequence comprising SEQ ID NO: 2108; a light chain encoded by a polynucleotide sequence comprising SEQ ID NO: 1952 and a heavy chain encoded by a polynucleotide sequence comprising SEQ ID NO: 2109; a light chain encoded by a polynucleotide sequence comprising SEQ ID NO: 1953 and a heavy chain encoded by a polynucleotide sequence comprising SEQ ID NO: 2110; a light chain encoded by a polynucleotide sequence comprising SEQ ID NO: 1954 and a heavy chain encoded by a polynucleotide sequence comprising SEQ ID NO: 2111; a light chain encoded by a polynucleotide sequence comprising SEQ ID NO: 1955 and a heavy chain encoded by a polynucleotide sequence comprising SEQ ID NO: 2112; a light chain encoded by a polynucleotide sequence comprising SEQ ID NO: 1956 and a heavy chain encoded by a polynucleotide sequence comprising SEQ ID NO: 2113; a light chain encoded by a polynucleotide sequence comprising SEQ ID NO: 1957 and a heavy chain encoded by a polynucleotide sequence comprising SEQ ID NO: 2114; a light chain encoded by a polynucleotide sequence comprising SEQ ID NO: 1958 and a heavy chain encoded by a polynucleotide sequence comprising SEQ ID NO: 2115; a light chain encoded by a polynucleotide sequence comprising SEQ ID NO: 1959 and a heavy chain encoded by a polynucleotide sequence comprising SEQ ID NO: 2116; a light chain encoded by a polynucleotide sequence comprising SEQ ID NO: 1960 and a heavy chain encoded by a polynucleotide sequence comprising SEQ ID NO: 2117; a light chain encoded by a polynucleotide sequence comprising SEQ ID NO: 1961 and a heavy chain encoded by a polynucleotide sequence comprising SEQ ID NO: 2118; a light chain encoded by a polynucleotide sequence comprising SEQ ID NO: 1962 and a heavy chain encoded by a polynucleotide sequence comprising SEQ ID NO: 2119; a light chain encoded by a polynucleotide sequence comprising SEQ ID NO: 1963 and a heavy chain encoded by a polynucleotide sequence comprising SEQ ID NO: 2120; a light chain encoded by a polynucleotide sequence comprising SEQ ID NO: 1964 and a heavy chain encoded by a polynucleotide sequence comprising SEQ ID NO: 2121; a light chain encoded by a polynucleotide sequence comprising SEQ ID NO: 1965 and a heavy chain encoded by a polynucleotide sequence comprising SEQ ID NO: 2122; a light chain encoded by a polynucleotide sequence comprising SEQ ID NO: 1966 and a heavy chain encoded by a polynucleotide sequence comprising SEQ ID NO: 2123; a light chain encoded by a polynucleotide sequence comprising SEQ ID NO: 1967 and a heavy chain encoded by a polynucleotide sequence comprising SEQ ID NO: 2124; a light chain encoded by a polynucleotide sequence comprising SEQ ID NO: 1968 and a heavy chain encoded by a polynucleotide sequence comprising SEQ ID NO: 2125; a light chain encoded by a polynucleotide sequence comprising SEQ ID NO: 1969 and a heavy chain encoded by a polynucleotide sequence comprising SEQ ID NO: 2126; a light chain encoded by a polynucleotide sequence comprising SEQ ID NO: 1970 and a heavy chain encoded by a polynucleotide sequence comprising SEQ ID NO: 2127; a light chain encoded by a polynucleotide sequence comprising SEQ ID NO: 1971 and a heavy chain encoded by a polynucleotide sequence comprising SEQ ID NO: 2128; a light chain encoded by a polynucleotide sequence comprising SEQ ID NO: 1972 and a heavy chain encoded by a polynucleotide sequence comprising SEQ ID NO: 2129; a light chain encoded by a polynucleotide sequence comprising SEQ ID NO: 1973 and a heavy chain encoded by a polynucleotide sequence comprising SEQ ID NO: 2130; a light chain encoded by a polynucleotide sequence comprising SEQ ID NO: 1974 and a heavy chain encoded by a polynucleotide sequence comprising SEQ ID NO: 2131; a light chain encoded by a polynucleotide sequence comprising SEQ ID NO: 1975 and a heavy chain encoded by a polynucleotide sequence comprising SEQ ID NO: 2132; a light chain encoded by a polynucleotide sequence comprising SEQ ID NO: 1976 and a heavy chain encoded by a polynucleotide sequence comprising SEQ ID NO: 2133; a light chain encoded by a polynucleotide sequence comprising SEQ ID NO: 1977 and a heavy chain encoded by a polynucleotide sequence comprising SEQ ID NO: 2134; a light chain encoded by a polynucleotide sequence comprising SEQ ID NO: 1978 and a heavy chain encoded by a polynucleotide sequence comprising SEQ ID NO: 2135; a light chain encoded by a polynucleotide sequence comprising SEQ ID NO: 1979 and a heavy chain encoded by a polynucleotide sequence comprising SEQ ID NO: 2136; a light chain encoded by a polynucleotide sequence comprising SEQ ID NO: 1980 and a heavy chain encoded by a polynucleotide sequence comprising SEQ ID NO: 2137; a light chain encoded by a polynucleotide sequence comprising SEQ ID NO: 1981 and a heavy chain encoded by a polynucleotide sequence comprising SEQ ID NO: 2138; a light chain encoded by a polynucleotide sequence comprising SEQ ID NO: 1982 and a heavy chain encoded by a polynucleotide sequence comprising SEQ ID NO: 2139; a light chain encoded by a polynucleotide sequence comprising SEQ ID NO: 1983 and a heavy chain encoded by a polynucleotide sequence comprising SEQ ID NO: 2140; a light chain encoded by a polynucleotide sequence comprising SEQ ID NO: 1984 and a heavy chain encoded by a polynucleotide sequence comprising SEQ ID NO: 2141; a light chain encoded by a polynucleotide sequence comprising SEQ ID NO: 1985 and a heavy chain encoded by a polynucleotide sequence comprising SEQ ID NO: 2142; a light chain encoded by a polynucleotide sequence comprising SEQ ID NO: 1986 and a heavy chain encoded by a polynucleotide sequence comprising SEQ ID NO: 2143; a light chain encoded by a polynucleotide sequence comprising SEQ ID NO: 1987 and a heavy chain encoded by a polynucleotide sequence comprising SEQ ID NO: 2144; a light chain encoded by a polynucleotide sequence comprising SEQ ID NO: 1988 and a heavy chain encoded by a polynucleotide sequence comprising SEQ ID NO: 2145; a light chain encoded by a polynucleotide sequence comprising SEQ ID NO: 1989 and a heavy chain encoded by a polynucleotide sequence comprising SEQ ID NO: 2146; a light chain encoded by a polynucleotide sequence comprising SEQ ID NO: 1990 and a heavy chain encoded by a polynucleotide sequence comprising SEQ ID NO: 2147; a light chain encoded by a polynucleotide sequence comprising SEQ ID NO: 1991 and a heavy chain encoded by a polynucleotide sequence comprising SEQ ID NO: 2148; a light chain encoded by a polynucleotide sequence comprising SEQ ID NO: 1992 and a heavy chain encoded by a polynucleotide sequence comprising SEQ ID NO: 2149; a light chain encoded by a polynucleotide sequence comprising SEQ ID NO: 1993 and a heavy chain encoded by a polynucleotide sequence comprising SEQ ID NO: 2150; a light chain encoded by a polynucleotide sequence comprising SEQ ID NO: 1994 and a heavy chain encoded by a polynucleotide sequence comprising SEQ ID NO: 2151; a light chain encoded by a polynucleotide sequence comprising SEQ ID NO: 1995 and a heavy chain encoded by a polynucleotide sequence comprising SEQ ID NO: 2152; a light chain encoded by a polynucleotide sequence comprising SEQ ID NO: 1996 and a heavy chain encoded by a polynucleotide sequence comprising SEQ ID NO: 2153; a light chain encoded by a polynucleotide sequence comprising SEQ ID NO: 1997 and a heavy chain encoded by a polynucleotide sequence comprising SEQ ID NO: 2154; a light chain encoded by a polynucleotide sequence comprising SEQ ID NO: 1998 and a heavy chain encoded by a polynucleotide sequence comprising SEQ ID NO: 2155; a light chain encoded by a polynucleotide sequence comprising SEQ ID NO: 1999 and a heavy chain encoded by a polynucleotide sequence comprising SEQ ID NO: 2156; a light chain encoded by a polynucleotide sequence comprising SEQ ID NO: 2000 and a heavy chain encoded by a polynucleotide sequence comprising SEQ ID NO: 2157; a light chain encoded by a polynucleotide sequence comprising SEQ ID NO: 2001 and a heavy chain encoded by a polynucleotide sequence comprising SEQ ID NO: 2158; a light chain encoded by a polynucleotide sequence comprising SEQ ID NO: 2002 and a heavy chain encoded by a polynucleotide sequence comprising SEQ ID NO: 2159; a light chain encoded by a polynucleotide sequence comprising SEQ ID NO: 2003 and a heavy chain encoded by a polynucleotide sequence comprising SEQ ID NO: 2160; a light chain encoded by a polynucleotide sequence comprising SEQ ID NO: 2004 and a heavy chain encoded by a polynucleotide sequence comprising SEQ ID NO: 2161; a light chain encoded by a polynucleotide sequence comprising SEQ ID NO: 2005 and a heavy chain encoded by a polynucleotide sequence comprising SEQ ID NO: 2162; a light chain encoded by a polynucleotide sequence comprising SEQ ID NO: 2006 and a heavy chain encoded by a polynucleotide sequence comprising SEQ ID NO: 2163; a light chain encoded by a polynucleotide sequence comprising SEQ ID NO: 2007 and a heavy chain encoded by a polynucleotide sequence comprising SEQ ID NO: 2164; a light chain encoded by a polynucleotide sequence comprising SEQ ID NO: 2008 and a heavy chain encoded by a polynucleotide sequence comprising SEQ ID NO: 2165; a light chain encoded by a polynucleotide sequence comprising SEQ ID NO: 2009 and a heavy chain encoded by a polynucleotide sequence comprising SEQ ID NO: 2166; a light chain encoded by a polynucleotide sequence comprising SEQ ID NO: 2010 and a heavy chain encoded by a polynucleotide sequence comprising SEQ ID NO: 2167; a light chain encoded by a polynucleotide sequence comprising SEQ ID NO: 2011 and a heavy chain encoded by a polynucleotide sequence comprising SEQ ID NO: 2168; a light chain encoded by a polynucleotide sequence comprising SEQ ID NO: 2012 and a heavy chain encoded by a polynucleotide sequence comprising SEQ ID NO: 2169; a light chain encoded by a polynucleotide sequence comprising SEQ ID NO: 2013 and a heavy chain encoded by a polynucleotide sequence comprising SEQ ID NO: 2170; a light chain encoded by a polynucleotide sequence comprising SEQ ID NO: 2014 and a heavy chain encoded by a polynucleotide sequence comprising SEQ ID NO: 2171; a light chain encoded by a polynucleotide sequence comprising SEQ ID NO: 2015 and a heavy chain encoded by a polynucleotide sequence comprising SEQ ID NO: 2172; a light chain encoded by a polynucleotide sequence comprising SEQ ID NO: 2016 and a heavy chain encoded by a polynucleotide sequence comprising SEQ ID NO: 2173; a light chain encoded by a polynucleotide sequence comprising SEQ ID NO: 2017 and a heavy chain encoded by a polynucleotide sequence comprising SEQ ID NO: 2174; a light chain encoded by a polynucleotide sequence comprising SEQ ID NO: 2018 and a heavy chain encoded by a polynucleotide sequence comprising SEQ ID NO: 2175; a light chain encoded by a polynucleotide sequence comprising SEQ ID NO: 2019 and a heavy chain encoded by a polynucleotide sequence comprising SEQ ID NO: 2176; a light chain encoded by a polynucleotide sequence comprising SEQ ID NO: 2020 and a heavy chain encoded by a polynucleotide sequence comprising SEQ ID NO: 2177; a light chain encoded by a polynucleotide sequence comprising SEQ ID NO: 2021 and a heavy chain encoded by a polynucleotide sequence comprising SEQ ID NO: 2178; a light chain encoded by a polynucleotide sequence comprising SEQ ID NO: 2022 and a heavy chain encoded by a polynucleotide sequence comprising SEQ ID NO: 2179; a light chain encoded by a polynucleotide sequence comprising SEQ ID NO: 2023 and a heavy chain encoded by a polynucleotide sequence comprising SEQ ID NO: 2180; a light chain encoded by a polynucleotide sequence comprising SEQ ID NO: 2024 and a heavy chain encoded by a polynucleotide sequence comprising SEQ ID NO: 2181; a light chain encoded by a polynucleotide sequence comprising SEQ ID NO: 2025 and a heavy chain encoded by a polynucleotide sequence comprising SEQ ID NO: 2182; a light chain encoded by a polynucleotide sequence comprising SEQ ID NO: 2026 and a heavy chain encoded by a polynucleotide sequence comprising SEQ ID NO: 2183; a light chain encoded by a polynucleotide sequence comprising SEQ ID NO: 2027 and a heavy chain encoded by a polynucleotide sequence comprising SEQ ID NO: 2184; a light chain encoded by a polynucleotide sequence comprising SEQ ID NO: 2028 and a heavy chain encoded by a polynucleotide sequence comprising SEQ ID NO: 2185; a light chain encoded by a polynucleotide sequence comprising SEQ ID NO: 2029 and a heavy chain encoded by a polynucleotide sequence comprising SEQ ID NO: 2186; a light chain encoded by a polynucleotide sequence comprising SEQ ID NO: 2030 and a heavy chain encoded by a polynucleotide sequence comprising SEQ ID NO: 2187; a light chain encoded by a polynucleotide sequence comprising SEQ ID NO: 2031 and a heavy chain encoded by a polynucleotide sequence comprising SEQ ID NO: 2188; a light chain encoded by a polynucleotide sequence comprising SEQ ID NO: 2032 and a heavy chain encoded by a polynucleotide sequence comprising SEQ ID NO: 2189; a light chain encoded by a polynucleotide sequence comprising SEQ ID NO: 2033 and a heavy chain encoded by a polynucleotide sequence comprising SEQ ID NO: 2190; a light chain encoded by a polynucleotide sequence comprising SEQ ID NO: 2034 and a heavy chain encoded by a polynucleotide sequence comprising SEQ ID NO: 2191; a light chain encoded by a polynucleotide sequence comprising SEQ ID NO: 2035 and a heavy chain encoded by a polynucleotide sequence comprising SEQ ID NO: 2192; a light chain encoded by a polynucleotide sequence comprising SEQ ID NO: 2036 and a heavy chain encoded by a polynucleotide sequence comprising SEQ ID NO: 2193; a light chain encoded by a polynucleotide sequence comprising SEQ ID NO: 2037 and a heavy chain encoded by a polynucleotide sequence comprising SEQ ID NO: 2194; a light chain encoded by a polynucleotide sequence comprising SEQ ID NO: 2038 and a heavy chain encoded by a polynucleotide sequence comprising SEQ ID NO: 2195; a light chain encoded by a polynucleotide sequence comprising SEQ ID NO: 2039 and a heavy chain encoded by a polynucleotide sequence comprising SEQ ID NO: 2196; a light chain encoded by a polynucleotide sequence comprising SEQ ID NO: 2040 and a heavy chain encoded by a polynucleotide sequence comprising SEQ ID NO: 2197; and a light chain encoded by a polynucleotide sequence comprising SEQ ID NO: 2041 and a heavy chain encoded by a polynucleotide sequence comprising SEQ ID NO: 2198.

[0160] In another aspect, the antigen binding protein comprises a full-length light chain and a full-length heavy chain as listed in one of the rows for one of the antibodies listed in TABLE 5 or TABLE 10. Some antigen binding proteins that are provided comprise a full-length light chain and a full-length heavy chain as listed in one of the rows for one of the antibodies listed in TABLE 5 or TABLE 10, except that one or both of the chains differs from the sequence specified in the table at only 1, 2, 3, 4, 5, 6, 7, 8, 9, 10, 11, 12, 13, 14 or 15 amino acid residues, wherein each such sequence difference is independently either a single amino acid deletion, insertion or substitution, with the deletions, insertions and/or substitutions resulting in no more than 1, 2, 3, 4, 5, 6, 7, 8, 9, 10, 11, 12, 13, 14 or 15 amino acid changes relative to the full-length sequences specified in TABLE 5 or TABLE 10. In one embodiment the antigen binding protein comprises a full-length light chain and/or a full-length heavy chain from Table 5 or Table 10 with the N-terminal methionine deleted. In one embodiment the antigen binding protein comprises a full-length light chain and/or a full-length heavy chain from Table 5 or Table 10 with the C-terminal lysine deleted. Other antigen binding proteins also comprise a full-length light chain and a full-length heavy chain as listed in one of the rows for one of the antibodies listed in TABLE 5 or TABLE 10, except that one or both of the chains differs from the sequence specified in the table in that the light chain and/or heavy chain comprises or consists of a sequence of amino acids that has at least 70%, 75%, 80%, 85%, 90%, 95%, 96%, 97%, 98%, or 99% sequence identity to the amino acid sequences of the light chain or heavy chain sequences as specified in TABLE 5 or TABLE 10.

[0161] In another embodiment, the antigen binding protein consists of a just a light or a heavy chain polypeptide as set forth in TABLE 5 or TABLE 10.

[0162] In still another aspect, antigen-binding proteins containing the CDRs, variable domains and/or full-length sequences listed in TABLES 3, 4A, 4B, 5, 8, 9A, 9B, and 10 is a monoclonal antibody, a chimeric antibody, a humanized antibody, a human antibody, a multispecific antibody, or an antibody fragment of the foregoing. In another embodiment, the antibody fragment of the isolated antigen-binding proteins provided herein is a Fab fragment, a Fab′ fragment, an F(ab′)₂ fragment, an Fv fragment, a diabody, or a scFv based upon an antibody with the sequences as listed in TABLE 5 or TABLE 10.

[0163] In yet another aspect, the isolated antigen-binding protein provided in TABLE 5 or TABLE 10 can be coupled to a labeling group and can compete for binding to GIPR with an antigen binding protein of one of the isolated antigen-binding proteins provided herein.

[0164] In another embodiment, antigen binding proteins are provided that compete with one of the exemplified antibodies or functional fragments described above for specific binding to a human GIPR (e.g., SEQ ID NO: 3141). Such antigen binding proteins may bind to the same epitope as one of the antigen binding proteins described herein, or to an overlapping epitope. Antigen binding proteins and fragments that compete with the exemplified antigen binding proteins are expected to show similar functional properties. The exemplified antigen binding proteins and fragments include those described above, including those with heavy and light chains, variable region domains and CDRs included in TABLES 3, 4A, 4B, 5, 8, 9A, 9B, and 10. Thus, as a specific example, the antigen binding proteins that are provided include those that compete with an antibody having:

[0165] all 6 of the CDRs listed for any antibody listed in TABLES 4A and 4B or TABLES 9A and 9B;

[0166] a VH and a VL listed for any antibody listed in TABLE 3 or TABLE 8; or

[0167] two light chains and two heavy chains as specified for any antibody listed in TABLE 5 or TABLE 10.

[0168] The antigen binding proteins that are provided include monoclonal antibodies that bind to GIPR. Monoclonal antibodies may be produced using any technique known in the art, e.g., by immortalizing spleen cells harvested from the transgenic animal after completion of the immunization schedule. The spleen cells can be immortalized using any technique known in the art, e.g., by fusing them with myeloma cells to produce hybridomas. Myeloma cells for use in hybridoma-producing fusion procedures preferably are non-antibody-producing, have high fusion efficiency, and enzyme deficiencies that render them incapable of growing in certain selective media which support the growth of only the desired fused cells (hybridomas). Examples of suitable cell lines for use in mouse fusions include Sp-20, P3-X63/Ag8, P3-X63-Ag8.653, NS1/1.Ag 4 1, Sp210-Ag14, FO, NSO/U, MPC-11, MPC11-X45-GTG 1.7 and S194/5XXO Bul; examples of cell lines used in rat fusions include R210.RCY3, Y3-Ag 1.2.3, IR983F and 4B210. Other cell lines useful for cell fusions are U-266, GM1500-GRG2, LICR-LON-HMy2 and UC729-6.

[0169] In some instances, a hybridoma cell line is produced by immunizing an animal (e.g., a transgenic animal having human immunoglobulin sequences) with a GIPR immunogen; harvesting spleen cells from the immunized animal; fusing the harvested spleen cells to a myeloma cell line, thereby generating hybridoma cells; establishing hybridoma cell lines from the hybridoma cells, and identifying a hybridoma cell line that produces an antibody that binds a GIPR polypeptide. Such hybridoma cell lines, and anti-GIPR monoclonal antibodies produced by them, are aspects of the present application.

[0170] Monoclonal antibodies secreted by a hybridoma cell line can be purified using any technique known in the art. Hybridomas or mAbs may be further screened to identify mAbs with particular properties, such as the ability to increase GIPR activity.

[0171] Chimeric and humanized antibodies based upon the foregoing sequences are also provided. Monoclonal antibodies for use as therapeutic agents may be modified in various ways prior to use. One example is a chimeric antibody, which is an antibody composed of protein segments from different antibodies that are covalently joined to produce functional immunoglobulin light or heavy chains or immunologically functional portions thereof. Generally, a portion of the heavy chain and/or light chain is identical with or homologous to a corresponding sequence in antibodies derived from a particular species or belonging to a particular antibody class or subclass, while the remainder of the chain(s) is/are identical with or homologous to a corresponding sequence in antibodies derived from another species or belonging to another antibody class or subclass. For methods relating to chimeric antibodies, see, for example, U.S. Pat. No. 4,816,567; and Morrison et al., 1985, Proc. Natl. Acad. Sci. USA 81:6851-6855, which are hereby incorporated by reference. CDR grafting is described, for example, in U.S. Pat. Nos. 6,180,370, 5,693,762, 5,693,761, 5,585,089, and 5,530,101.

[0172] Generally, the goal of making a chimeric antibody is to create a chimera in which the number of amino acids from the intended patient species is maximized. One example is the “CDR-grafted” antibody, in which the antibody comprises one or more complementarity determining regions (CDRs) from a particular species or belonging to a particular antibody class or subclass, while the remainder of the antibody chain(s) is/are identical with or homologous to a corresponding sequence in antibodies derived from another species or belonging to another antibody class or subclass. For use in humans, the variable region or selected CDRs from a rodent antibody often are grafted into a human antibody, replacing the naturally-occurring variable regions or CDRs of the human antibody.

[0173] One useful type of chimeric antibody is a “humanized” antibody. Generally, a humanized antibody is produced from a monoclonal antibody raised initially in a non-human animal. Certain amino acid residues in this monoclonal antibody, typically from non-antigen recognizing portions of the antibody, are modified to be homologous to corresponding residues in a human antibody of corresponding isotype. Humanization can be performed, for example, using various methods by substituting at least a portion of a rodent variable region for the corresponding regions of a human antibody (see, e.g., U.S. Pat. Nos. 5,585,089, and 5,693,762; Jones et al., 1986, Nature 321:522-525; Riechmann et al., 1988, Nature 332:323-27; Verhoeyen et al., 1988, Science 239:1534-1536).

[0174] In one aspect, the CDRs of the light and heavy chain variable regions of the antibodies provided herein are grafted to framework regions (FRs) from antibodies from the same, or a different, phylogenetic species. For example, the CDRs of the heavy and light chain variable regions V_{H}1, V_{H}2, V_{H}3, V_{H}4, V_{H}5, V_{H}6, V_{H}7, V_{H}8, V_{H}9, V_{H}10, V_{H}11, V_{H}12 and/or V_{L}1, and V_{L}2 can be grafted to consensus human FRs. To create consensus human FRs, FRs from several human heavy chain or light chain amino acid sequences may be aligned to identify a consensus amino acid sequence. In other embodiments, the FRs of a heavy chain or light chain disclosed herein are replaced with the FRs from a different heavy chain or light chain. In one aspect, rare amino acids in the FRs of the heavy and light chains of GIPR antibodies are not replaced, while the rest of the FR amino acids are replaced. A “rare amino acid” is a specific amino acid that is in a position in which this particular amino acid is not usually found in an FR. Alternatively, the grafted variable regions from the one heavy or light chain may be used with a constant region that is different from the constant region of that particular heavy or light chain as disclosed herein. In other embodiments, the grafted variable regions are part of a single chain Fv antibody.

[0175] In certain embodiments, constant regions from species other than human can be used along with the human variable region(s) to produce hybrid antibodies.

[0176] Fully human GIPR antibodies are also provided. Methods are available for making fully human antibodies specific for a given antigen without exposing human beings to the antigen (“fully human antibodies”). One specific means provided for implementing the production of fully human antibodies is the “humanization” of the mouse humoral immune system. Introduction of human immunoglobulin (Ig) loci into mice in which the endogenous Ig genes have been inactivated is one means of producing fully human monoclonal antibodies (mAbs) in mouse, an animal that can be immunized with any desirable antigen. Using fully human antibodies can minimize the immunogenic and allergic responses that can sometimes be caused by administering mouse or mouse-derived mAbs to humans as therapeutic agents.

[0177] Fully human antibodies can be produced by immunizing transgenic animals (usually mice) that are capable of producing a repertoire of human antibodies in the absence of endogenous immunoglobulin production. Antigens for this purpose typically have six or more contiguous amino acids, and optionally are conjugated to a carrier, such as a hapten. See, e.g, Jakobovits et al., 1993, Proc. Natl. Acad. Sci. USA 90:2551-2555; Jakobovits et al., 1993, Nature 362:255-258; and Bruggermann et al., 1993, Year in Immunol. 7:33. In one example of such a method, transgenic animals are produced by incapacitating the endogenous mouse immunoglobulin loci encoding the mouse heavy and light immunoglobulin chains therein, and inserting into the mouse genome large fragments of human genome DNA containing loci that encode human heavy and light chain proteins. Partially modified animals, which have less than the full complement of human immunoglobulin loci, are then cross-bred to obtain an animal having all of the desired immune system modifications. When administered an immunogen, these transgenic animals produce antibodies that are immunospecific for the immunogen but have human rather than murine amino acid sequences, including the variable regions. For further details of such methods, see, for example, WO96/33735 and WO94/02602. Additional methods relating to transgenic mice for making human antibodies are described in U.S. Pat. Nos. 5,545,807; 6,713,610; 6,673,986; 6,162,963; 5,545,807; 6,300,129; 6,255,458; 5,877,397; 5,874,299 and 5,545,806; in PCT publications WO91/10741, WO90/04036, and in EP 546073B1 and EP 546073A1.

[0178] The transgenic mice described above, referred to herein as “HuMab” mice, contain a human immunoglobulin gene minilocus that encodes unrearranged human heavy ([mu] and [gamma]) and [kappa] light chain immunoglobulin sequences, together with targeted mutations that inactivate the endogenous [mu] and [kappa] chain loci (Lonberg et al., 1994, Nature 368:856-859). Accordingly, the mice exhibit reduced expression of mouse IgM or [kappa] and in response to immunization, and the introduced human heavy and light chain transgenes undergo class switching and somatic mutation to generate high affinity human IgG [kappa] monoclonal antibodies (Lonberg et al., supra.; Lonberg and Huszar, 1995, Intern. Rev. Immunol. 13: 65-93; Harding and Lonberg, 1995, Ann. N.Y Acad. Sci. 764:536-546). The preparation of HuMab mice is described in detail in Taylor et al., 1992, Nucleic Acids Research 20:6287-6295; Chen et al., 1993, International Immunology 5:647-656; Tuaillon et al., 1994, J. Immunol. 152:2912-2920; Lonberg et al., 1994, Nature 368:856-859; Lonberg, 1994, Handbook of Exp. Pharmacology 113:49-101; Taylor et al., 1994, International Immunology 6:579-591; Lonberg and Huszar, 1995, Intern. Rev. Immunol. 13:65-93; Harding and Lonberg, 1995, Ann. N.Y Acad. Sci. 764:536-546; Fishwild et al., 1996, Nature Biotechnology 14:845-851; the foregoing references are hereby incorporated by reference in their entirety for all purposes. See, further U.S. Pat. Nos. 5,545,806; 5,569,825; 5,625,126; 5,633,425; 5,789,650; 5,877,397; 5,661,016; 5,814,318; 5,874,299; and 5,770,429; as well as U.S. Pat. No. 5,545,807; International Publication Nos. WO 93/1227; WO 92/22646; and WO 92/03918, the disclosures of all of which are hereby incorporated by reference in their entirety for all purposes. Technologies utilized for producing human antibodies in these transgenic mice are disclosed also in WO 98/24893, and Mendez et al., 1997, Nature Genetics 15:146-156, which are hereby incorporated by reference. For example, the HCo7 and HCo12 transgenic mice strains can be used to generate human monoclonal antibodies against GIPR. Further details regarding the production of human antibodies using transgenic mice are provided below.

[0179] Using hybridoma technology, antigen-specific human mAbs with the desired specificity can be produced and selected from the transgenic mice such as those described above. Such antibodies may be cloned and expressed using a suitable vector and host cell, or the antibodies can be harvested from cultured hybridoma cells.

[0180] Fully human antibodies can also be derived from phage-display libraries (as disclosed in Hoogenboom et al., 1991, J Mol. Biol. 227:381; and Marks et al., 1991, J Mol. Biol. 222:581). Phage display techniques mimic immune selection through the display of antibody repertoires on the surface of filamentous bacteriophage, and subsequent selection of phage by their binding to an antigen of choice. One such technique is described in PCT Publication No. WO 99/10494 (hereby incorporated by reference).

[0181] The GIPR binding protein can also be a variant, mimetic, derivative or oligomer based upon the structure of GIPR antigen binding proteins have the CDRs, variable regions and/or full-length chains as described above.

[0182] In one embodiment, for instance, an antigen binding protein is a variant form of the antigen binding proteins disclosed above. For instance, some of the antigen binding proteins have one or more conservative amino acid substitutions in one or more of the heavy or light chains, variable regions or CDRs.

[0183] Naturally-occurring amino acids may be divided into classes based on common side chain properties:

[0184] 1) hydrophobic: norleucine, Met, Ala, Val, Leu, Ile;

[0185] 2) neutral hydrophilic: Cys, Ser, Thr, Asn, Gln;

[0186] 3) acidic: Asp, Glu;

[0187] 4) basic: His, Lys, Arg;

[0188] 5) residues that influence chain orientation: Gly, Pro; and

[0189] 6) aromatic: Trp, Tyr, Phe.

[0190] Conservative amino acid substitutions may involve exchange of a member of one of these classes with another member of the same class. Conservative amino acid substitutions may encompass non-naturally occurring amino acid residues, which are typically incorporated by chemical peptide synthesis rather than by synthesis in biological systems. These include peptidomimetics and other reversed or inverted forms of amino acid moieties.

[0191] Non-conservative substitutions may involve the exchange of a member of one of the above classes for a member from another class. Such substituted residues may be introduced into regions of the antibody that are homologous with human antibodies, or into the non-homologous regions of the molecule.

[0192] In making such changes, according to certain embodiments, the hydropathic index of amino acids may be considered. The hydropathic profile of a protein is calculated by assigning each amino acid a numerical value (“hydropathy index”) and then repetitively averaging these values along the peptide chain. Each amino acid has been assigned a hydropathic index on the basis of its hydrophobicity and charge characteristics. They are: isoleucine (+4.5); valine (+4.2); leucine (+3.8); phenylalanine (+2.8); cysteine/cystine (+2.5); methionine (+1.9); alanine (+1.8); glycine (−0.4); threonine (−0.7); serine (−0.8); tryptophan (−0.9); tyrosine (−1.3); proline (−1.6); histidine (−3.2); glutamate (−3.5); glutamine (−3.5); aspartate (−3.5); asparagine (−3.5); lysine (−3.9); and arginine (−4.5).

[0193] The importance of the hydropathic profile in conferring interactive biological function on a protein is understood in the art (see, e.g., Kyte et al., 1982, J. Mol. Biol. 157:105-131). It is known that certain amino acids may be substituted for other amino acids having a similar hydropathic index or score and still retain a similar biological activity. In making changes based upon the hydropathic index, in certain embodiments, the substitution of amino acids whose hydropathic indices are within ±2 is included. In some aspects, those which are within ±1 are included, and in other aspects, those within ±0.5 are included.

[0194] It is also understood in the art that the substitution of like amino acids can be made effectively on the basis of hydrophilicity, particularly where the biologically functional protein or peptide thereby created is intended for use in immunological embodiments, as in the present case. In certain embodiments, the greatest local average hydrophilicity of a protein, as governed by the hydrophilicity of its adjacent amino acids, correlates with its immunogenicity and antigen-binding or immunogenicity, that is, with a biological property of the protein.

[0195] The following hydrophilicity values have been assigned to these amino acid residues: arginine (+3.0); lysine (+3.0); aspartate (+3.0±1); glutamate (+3.0±1); serine (+0.3); asparagine (+0.2); glutamine (+0.2); glycine (0); threonine (−0.4); proline (−0.5±1); alanine (−0.5); histidine (−0.5); cysteine (−1.0); methionine (−1.3); valine (−1.5); leucine (−1.8); isoleucine (−1.8); tyrosine (−2.3); phenylalanine (−2.5) and tryptophan (−3.4). In making changes based upon similar hydrophilicity values, in certain embodiments, the substitution of amino acids whose hydrophilicity values are within ±2 is included, in other embodiments, those which are within ±1 are included, and in still other embodiments, those within ±0.5 are included. In some instances, one may also identify epitopes from primary amino acid sequences on the basis of hydrophilicity. These regions are also referred to as “epitopic core regions.”

[0196] Exemplary conservative amino acid substitutions are set forth in Table 11.

TABLE 11
Conservative Amino Acid Substitutions

| Original Residue | Exemplary Substitutions |
|---|---|
| Ala | Ser |
| Arg | Lys |
| Asn | Gln, His |
| Asp | Glu |
| Cys | Ser |
| Gln | Asn |
| Glu | Asp |
| Gly | Pro |
| His | Asn, Gln |
| Ile | Leu, Val |
| Leu | Ile, Val |
| Lys | Arg, Gln, Glu |
| Met | Leu, Ile |
| Phe | Met, Leu, Tyr |
| Ser | Thr |
| Thr | Ser |
| Trp | Tyr |
| Tyr | Trp, Phe |
| Val | Ile, Leu |

[0197] A skilled artisan will be able to determine suitable variants of polypeptides as set forth herein using well-known techniques. One skilled in the art may identify suitable areas of the molecule that may be changed without destroying activity by targeting regions not believed to be important for activity. The skilled artisan also will be able to identify residues and portions of the molecules that are conserved among similar polypeptides. In further embodiments, even areas that may be important for biological activity or for structure may be subject to conservative amino acid substitutions without destroying the biological activity or without adversely affecting the polypeptide structure.

[0198] Additionally, one skilled in the art can review structure-function studies identifying residues in similar polypeptides that are important for activity or structure. In view of such a comparison, one can predict the importance of amino acid residues in a protein that correspond to amino acid residues important for activity or structure in similar proteins. One skilled in the art may opt for chemically similar amino acid substitutions for such predicted important amino acid residues.

[0199] One skilled in the art can also analyze the 3-dimensional structure and amino acid sequence in relation to that structure in similar polypeptides. In view of such information, one skilled in the art may predict the alignment of amino acid residues of an antibody with respect to its three dimensional structure. One skilled in the art may choose not to make radical changes to amino acid residues predicted to be on the surface of the protein, since such residues may be involved in important interactions with other molecules. Moreover, one skilled in the art may generate test variants containing a single amino acid substitution at each desired amino acid residue. These variants can then be screened using assays for GIPR activity, thus yielding information regarding which amino acids can be changed and which must not be changed. In other words, based on information gathered from such routine experiments, one skilled in the art can readily determine the amino acid positions where further substitutions should be avoided either alone or in combination with other mutations.

[0200] A number of scientific publications have been devoted to the prediction of secondary structure. See, Moult, 1996, Curr. Op. in Biotech. 7:422-427; Chou et al., 1974, Biochem. 13:222-245; Chou et al., 1974, Biochemistry 113:211-222; Chou et al., 1978, Adv. Enzymol. Relat. Areas Mol. Biol. 47:45-148; Chou et al., 1979, Ann. Rev. Biochem. 47:251-276; and Chou et al., 1979, Biophys. J 26:367-384. Moreover, computer programs are currently available to assist with predicting secondary structure. One method of predicting secondary structure is based upon homology modeling. For example, two polypeptides or proteins that have a sequence identity of greater than 30%, or similarity greater than 40% can have similar structural topologies. The recent growth of the protein structural database (PDB) has provided enhanced predictability of secondary structure, including the potential number of folds within a polypeptide's or protein's structure. See, Holm et al., 1999, Nucl. Acid. Res. 27:244-247. It has been suggested (Brenner et al., 1997, Curr. Op. Struct. Biol. 7:369-376) that there are a limited number of folds in a given polypeptide or protein and that once a critical number of structures have been resolved, structural prediction will become dramatically more accurate.

[0201] Additional methods of predicting secondary structure include “threading” (Jones, 1997, Curr. Opin. Struct. Biol. 7:377-387; Sippl et al., 1996, Structure 4:15-19), “profile analysis” (Bowie et al., 1991, Science 253:164-170; Gribskov et al., 1990, Meth. Enzym. 183:146-159; Gribskov et al., 1987, Proc. Nat. Acad. Sci. 84:4355-4358), and “evolutionary linkage” (See, Holm, 1999, supra; and Brenner, 1997, supra).

[0202] In some embodiments, amino acid substitutions are made that: (1) reduce susceptibility to proteolysis, (2) reduce susceptibility to oxidation, (3) alter binding affinity for forming protein complexes, (4) alter ligand or antigen binding affinities, and/or (4) confer or modify other physicochemical or functional properties on such polypeptides. For example, single or multiple amino acid substitutions (in certain embodiments, conservative amino acid substitutions) may be made in the naturally-occurring sequence. Substitutions can be made in that portion of the antibody that lies outside the domain(s) forming intermolecular contacts). In such embodiments, conservative amino acid substitutions can be used that do not substantially change the structural characteristics of the parent sequence (e.g., one or more replacement amino acids that do not disrupt the secondary structure that characterizes the parent or native antigen binding protein). Examples of art-recognized polypeptide secondary and tertiary structures are described in Proteins, Structures and Molecular Principles (Creighton, Ed.), 1984, W. H. New York: Freeman and Company; Introduction to Protein Structure (Branden and Tooze, eds.), 1991, New York: Garland Publishing; and Thornton et al., 1991, Nature 354:105, which are each incorporated herein by reference.

[0203] Additional preferred antibody variants include cysteine variants wherein one or more cysteine residues in the parent or native amino acid sequence are deleted from or substituted with another amino acid (e.g., serine). Cysteine variants are useful, inter alia when antibodies must be refolded into a biologically active conformation. Cysteine variants may have fewer cysteine residues than the native antibody, and typically have an even number to minimize interactions resulting from unpaired cysteines.

[0204] The heavy and light chains, variable regions domains and CDRs that are disclosed can be used to prepare polypeptides that contain an antigen binding region that can specifically bind to GIPR. For example, one or more of the CDRs can be incorporated into a molecule (e.g., a polypeptide) covalently or noncovalently to make an immunoadhesion. An immunoadhesion may incorporate the CDR(s) as part of a larger polypeptide chain, may covalently link the CDR(s) to another polypeptide chain, or may incorporate the CDR(s) noncovalently. The CDR(s) enable the immunoadhesion to bind specifically to a particular antigen of interest (e.g., an GIPR polypeptide or epitope thereof).

[0205] Mimetics (e.g., “peptide mimetics” or “peptidomimetics”) based upon the variable region domains and CDRs that are described herein are also provided. These analogs can be peptides, non-peptides or combinations of peptide and non-peptide regions. Fauchere, 1986, Adv. Drug Res. 15:29; Veber and Freidinger, 1985, TINS p. 392; and Evans et al., 1987, J Med. Chem. 30:1229, which are incorporated herein by reference for any purpose. Peptide mimetics that are structurally similar to therapeutically useful peptides may be used to produce a similar therapeutic or prophylactic effect. Such compounds are often developed with the aid of computerized molecular modeling. Generally, peptidomimetics are proteins that are structurally similar to an antibody displaying a desired biological activity, such as here the ability to specifically bind GIPR, but have one or more peptide linkages optionally replaced by a linkage selected from: —CH₂NH—, —CH₂S—, —CH₂—CH₂—, —CH—CH-(cis and trans), —COCH₂—, —CH(OH)CH₂—, and —CH₂SO—, by methods well known in the art. Systematic substitution of one or more amino acids of a consensus sequence with a D-amino acid of the same type (e.g., D-lysine in place of L-lysine) may be used in certain embodiments to generate more stable proteins. In addition, constrained peptides comprising a consensus sequence or a substantially identical consensus sequence variation may be generated by methods known in the art (Rizo and Gierasch, 1992, Ann. Rev. Biochem. 61:387), incorporated herein by reference), for example, by adding internal cysteine residues capable of forming intramolecular disulfide bridges which cyclize the peptide.

[0206] Derivatives of the antigen binding proteins that are described herein are also provided. The derivatized antigen binding proteins can comprise any molecule or substance that imparts a desired property to the antibody or fragment, such as increased half-life in a particular use. The derivatized antigen binding protein can comprise, for example, a detectable (or labeling) moiety (e.g., a radioactive, colorimetric, antigenic or enzymatic molecule, a detectable bead (such as a magnetic or electrodense (e.g., gold) bead), or a molecule that binds to another molecule (e.g., biotin or streptavidin)), a therapeutic or diagnostic moiety (e.g., a radioactive, cytotoxic, or pharmaceutically active moiety), or a molecule that increases the suitability of the antigen binding protein for a particular use (e.g., administration to a subject, such as a human subject, or other in vivo or in vitro uses). Examples of molecules that can be used to derivatize an antigen binding protein include albumin (e.g., human serum albumin) and polyethylene glycol (PEG). Albumin-linked and PEGylated derivatives of antigen binding proteins can be prepared using techniques well known in the art. Certain antigen binding proteins include a pegylated single chain polypeptide as described herein. In one embodiment, the antigen binding protein is conjugated or otherwise linked to transthyretin (TTR) or a TTR variant. The TTR or TTR variant can be chemically modified with, for example, a chemical selected from the group consisting of dextran, poly(n-vinyl pyrrolidone), polyethylene glycols, propropylene glycol homopolymers, polypropylene oxide/ethylene oxide co-polymers, polyoxyethylated polyols and polyvinyl alcohols.

[0207] Other derivatives include covalent or aggregative conjugates of GIPR antigen binding proteins with other proteins or polypeptides, such as by expression of recombinant fusion proteins comprising heterologous polypeptides fused to the N-terminus or C-terminus of an GIPR antigen binding protein. For example, the conjugated peptide may be a heterologous signal (or leader) polypeptide, e.g., the yeast alpha-factor leader, or a peptide such as an epitope tag. GIPR antigen binding protein-containing fusion proteins can comprise peptides added to facilitate purification or identification of the GIPR antigen binding protein (e.g., poly-His). A GIPR antigen binding protein also can be linked to the FLAG peptide as described in Hopp et al., 1988, Bio Technology 6:1204; and U.S. Pat. No. 5,011,912. The FLAG peptide is highly antigenic and provides an epitope reversibly bound by a specific monoclonal antibody (mAb), enabling rapid assay and facile purification of expressed recombinant protein. Reagents useful for preparing fusion proteins in which the FLAG peptide is fused to a given polypeptide are commercially available (Sigma, St. Louis, Mo.).

[0208] In some embodiments, the antigen binding protein comprises one or more labels. The term “labeling group” or “label” means any detectable label. Examples of suitable labeling groups include, but are not limited to, the following: radioisotopes or radionuclides (e.g., ³H, ¹⁴C, ¹⁵N, ³⁵S, ⁹⁰Y, ⁹⁹Tc, ¹¹¹In, ¹²⁵I, ¹³¹I), fluorescent groups (e.g., FITC, rhodamine, lanthanide phosphors), enzymatic groups (e.g., horseradish peroxidase, β-galactosidase, luciferase, alkaline phosphatase), chemiluminescent groups, biotinyl groups, or predetermined polypeptide epitopes recognized by a secondary reporter (e.g., leucine zipper pair sequences, binding sites for secondary antibodies, metal binding domains, epitope tags). In some embodiments, the labeling group is coupled to the antigen binding protein via spacer arms of various lengths to reduce potential steric hindrance. Various methods for labeling proteins are known in the art and may be used as is seen fit.

[0209] The term “effector group” means any group coupled to an antigen binding protein that acts as a cytotoxic agent. Examples for suitable effector groups are radioisotopes or radionuclides (e.g., ³H, ¹⁴C, ¹⁵N, ³⁵S, ⁹⁰Y, ⁹⁹Tc, ¹¹¹In, ¹²⁵I, ¹³¹I). Other suitable groups include toxins, therapeutic groups, or chemotherapeutic groups. Examples of suitable groups include calicheamicin, auristatins, geldanamycin and maytansine. In some embodiments, the effector group is coupled to the antigen binding protein via spacer arms of various lengths to reduce potential steric hindrance.

[0210] In general, labels fall into a variety of classes, depending on the assay in which they are to be detected: a) isotopic labels, which may be radioactive or heavy isotopes; b) magnetic labels (e.g., magnetic particles); c) redox active moieties; d) optical dyes; enzymatic groups (e.g. horseradish peroxidase, β-galactosidase, luciferase, alkaline phosphatase); e) biotinylated groups; and f) predetermined polypeptide epitopes recognized by a secondary reporter (e.g., leucine zipper pair sequences, binding sites for secondary antibodies, metal binding domains, epitope tags, etc.). In some embodiments, the labeling group is coupled to the antigen binding protein via spacer arms of various lengths to reduce potential steric hindrance. Various methods for labeling proteins are known in the art.

[0211] Specific labels include optical dyes, including, but not limited to, chromophores, phosphors and fluorophores, with the latter being specific in many instances. Fluorophores can be either “small molecule” fluores, or proteinaceous fluores.

[0212] By “fluorescent label” is meant any molecule that may be detected via its inherent fluorescent properties. Suitable fluorescent labels include, but are not limited to, fluorescein, rhodamine, tetramethylrhodamine, eosin, erythrosin, coumarin, methyl-coumarins, pyrene, Malacite green, stilbene, Lucifer Yellow, Cascade BlueJ, Texas Red, IAEDANS, EDANS, BODIPY FL, LC Red 640, Cy 5, Cy 5.5, LC Red 705, Oregon green, the Alexa-Fluor dyes (Alexa Fluor 350, Alexa Fluor 430, Alexa Fluor 488, Alexa Fluor 546, Alexa Fluor 568, Alexa Fluor 594, Alexa Fluor 633, Alexa Fluor 660, Alexa Fluor 680), Cascade Blue, Cascade Yellow and R-phycoerythrin (PE) (Molecular Probes, Eugene, Oreg.), FITC, Rhodamine, and Texas Red (Pierce, Rockford, Ill.), Cy5, Cy5.5, Cy7 (Amersham Life Science, Pittsburgh, Pa.). Suitable optical dyes, including fluorophores, are described in Molecular Probes Handbook by Richard P. Haugland, hereby expressly incorporated by reference.

[0213] Suitable proteinaceous fluorescent labels also include, but are not limited to, green fluorescent protein, including a Renilla, Ptilosarcus, or Aequorea species of GFP (Chalfie et al., 1994, Science 263:802-805), EGFP (Clontech Labs., Inc., Genbank Accession Number U55762), blue fluorescent protein (BFP, Quantum Biotechnologies, Inc., Quebec, Canada; Stauber, 1998, Biotechniques 24:462-471; Heim et al., 1996, Curr. Biol. 6:178-182), enhanced yellow fluorescent protein (EYFP, Clontech Labs., Inc.), luciferase (Ichiki et al., 1993, J Immunol. 150:5408-5417), R galactosidase (Nolan et al., 1988, Proc. Natl. Acad. Sci. U.S.A. 85:2603-2607) and Renilla (WO92/15673, WO95/07463, WO98/14605, WO98/26277, WO99/49019, U.S. Pat. Nos. 5,292,658, 5,418,155, 5,683,888, 5,741,668, 5,777,079, 5,804,387, 5,874,304, 5,876,995, 5,925,558).

[0214] Nucleic acids that encode for the antigen binding proteins described herein, or portions thereof, are also provided, including nucleic acids encoding one or both chains of an antibody, or a fragment, derivative, mutein, or variant thereof, polynucleotides encoding heavy chain variable regions or only CDRs, polynucleotides sufficient for use as hybridization probes, PCR primers or sequencing primers for identifying, analyzing, mutating or amplifying a polynucleotide encoding a polypeptide, anti-sense nucleic acids for inhibiting expression of a polynucleotide, and complementary sequences of the foregoing. The nucleic acids can be any length. They can be, for example, 5, 10, 15, 20, 25, 30, 35, 40, 45, 50, 75, 100, 125, 150, 175, 200, 250, 300, 350, 400, 450, 500, 750, 1,000, 1,500, 3,000, 5,000 or more nucleotides in length, and/or can comprise one or more additional sequences, for example, regulatory sequences, and/or be part of a larger nucleic acid, for example, a vector. The nucleic acids can be single-stranded or double-stranded and can comprise RNA and/or DNA nucleotides, and artificial variants thereof (e.g., peptide nucleic acids). Any variable region provided herein may be attached to these constant regions to form complete heavy and light chain sequences. However, it should be understood that these constant regions sequences are provided as specific examples only. In some embodiments, the variable region sequences are joined to other constant region sequences that are known in the art.

[0215] Nucleic acids encoding certain antigen binding proteins, or portions thereof (e.g., full-length antibody, heavy or light chain, variable domain, or CDRH1, CDRH2, CDRH3, CDRL1, CDRL2, or CDRL3) may be isolated from B-cells of mice that have been immunized with GIPR or an immunogenic fragment thereof. The nucleic acid may be isolated by conventional procedures such as polymerase chain reaction (PCR). Phage display is another example of a known technique whereby derivatives of antibodies and other antigen binding proteins may be prepared. In one approach, polypeptides that are components of an antigen binding protein of interest are expressed in any suitable recombinant expression system, and the expressed polypeptides are allowed to assemble to form antigen binding proteins.

[0216] An aspect further provides nucleic acids that hybridize to other nucleic acids under particular hybridization conditions. Methods for hybridizing nucleic acids are well-known in the art. See, e.g., Current Protocols in Molecular Biology, John Wiley & Sons, N.Y. (1989), 6.3.1-6.3.6. As defined herein, a moderately stringent hybridization condition uses a prewashing solution containing 5× sodium chloride/sodium citrate (SSC), 0.5% SDS, 1.0 mM EDTA (pH 8.0), hybridization buffer of about 50% formamide, 6×SSC, and a hybridization temperature of 55° C. (or other similar hybridization solutions, such as one containing about 50% formamide, with a hybridization temperature of 42° C.), and washing conditions of 60° C., in 0.5×SSC, 0.1% SDS. A stringent hybridization condition hybridizes in 6×SSC at 45° C., followed by one or more washes in 0.1×SSC, 0.2% SDS at 68° C. Furthermore, one of skill in the art can manipulate the hybridization and/or washing conditions to increase or decrease the stringency of hybridization such that nucleic acids comprising nucleotide sequences that are at least 65%, 70%, 75%, 80%, 85%, 90%, 95%, 98% or 99% identical to each other typically remain hybridized to each other.

[0217] The basic parameters affecting the choice of hybridization conditions and guidance for devising suitable conditions are set forth by, for example, Sambrook, Fritsch, and Maniatis (2001, Molecular Cloning: A Laboratory Manual, Cold Spring Harbor Laboratory Press, Cold Spring Harbor, N.Y., supra; and Current Protocols in Molecular Biology, 1995, Ausubel et al., eds., John Wiley & Sons, Inc., sections 2.10 and 6.3-6.4), and can be readily determined by those having ordinary skill in the art based on, e.g., the length and/or base composition of the nucleic acid.

[0218] Changes can be introduced by mutation into a nucleic acid, thereby leading to changes in the amino acid sequence of a polypeptide (e.g., an antibody or antibody derivative) that it encodes. Mutations can be introduced using any technique known in the art. In one embodiment, one or more particular amino acid residues are changed using, for example, a site-directed mutagenesis protocol. In another embodiment, one or more randomly selected residues is changed using, for example, a random mutagenesis protocol. However it is made, a mutant polypeptide can be expressed and screened for a desired property.

[0219] Mutations can be introduced into a nucleic acid without significantly altering the biological activity of a polypeptide that it encodes. For example, one can make nucleotide substitutions leading to amino acid substitutions at non-essential amino acid residues. Alternatively, one or more mutations can be introduced into a nucleic acid that selectively changes the biological activity of a polypeptide that it encodes. For example, the mutation can quantitatively or qualitatively change the biological activity. Examples of quantitative changes include increasing, reducing or eliminating the activity. Examples of qualitative changes include changing the antigen specificity of an antibody. In one embodiment, a nucleic acid encoding any antigen binding protein described herein can be mutated to alter the amino acid sequence using molecular biology techniques that are well-established in the art.

[0220] Another aspect provides nucleic acid molecules that are suitable for use as primers or hybridization probes for the detection of nucleic acid sequences. A nucleic acid molecule can comprise only a portion of a nucleic acid sequence encoding a full-length polypeptide, for example, a fragment that can be used as a probe or primer or a fragment encoding an active portion of a polypeptide.

[0221] Probes based on the sequence of a nucleic acid can be used to detect the nucleic acid or similar nucleic acids, for example, transcripts encoding a polypeptide. The probe can comprise a label group, e.g., a radioisotope, a fluorescent compound, an enzyme, or an enzyme co-factor. Such probes can be used to identify a cell that expresses the polypeptide.

[0222] Another aspect provides vectors comprising a nucleic acid encoding a polypeptide or a portion thereof (e.g., a fragment containing one or more CDRs or one or more variable region domains). Examples of vectors include, but are not limited to, plasmids, viral vectors, non-episomal mammalian vectors and expression vectors, for example, recombinant expression vectors. The recombinant expression vectors can comprise a nucleic acid in a form suitable for expression of the nucleic acid in a host cell. The recombinant expression vectors include one or more regulatory sequences, selected on the basis of the host cells to be used for expression, which is operably linked to the nucleic acid sequence to be expressed. Regulatory sequences include those that direct constitutive expression of a nucleotide sequence in many types of host cells (e.g., SV40 early gene enhancer, Rous sarcoma virus promoter and cytomegalovirus promoter), those that direct expression of the nucleotide sequence only in certain host cells (e.g., tissue-specific regulatory sequences, see, Voss et al., 1986, Trends Biochem. Sci. 11287, Maniatis et al., 1987, Science 236:1237, incorporated by reference herein in their entireties), and those that direct inducible expression of a nucleotide sequence in response to particular treatment or condition (e.g., the metallothionin promoter in mammalian cells and the tet-responsive and/or streptomycin responsive promoter in both prokaryotic and eukaryotic systems (see, id.). It will be appreciated by those skilled in the art that the design of the expression vector can depend on such factors as the choice of the host cell to be transformed, the level of expression of protein desired, etc. The expression vectors can be introduced into host cells to thereby produce proteins or peptides, including fusion proteins or peptides, encoded by nucleic acids as described herein.

[0223] Another aspect provides host cells into which a recombinant expression vector has been introduced. A host cell can be any prokaryotic cell (for example, E. coli) or eukaryotic cell (for example, yeast, insect, or mammalian cells (e.g., CHO cells)). Vector DNA can be introduced into prokaryotic or eukaryotic cells via conventional transformation or transfection techniques. For stable transfection of mammalian cells, it is known that, depending upon the expression vector and transfection technique used, only a small fraction of cells may integrate the foreign DNA into their genome. In order to identify and select these integrants, a gene that encodes a selectable marker (e.g., for resistance to antibiotics) is generally introduced into the host cells along with the gene of interest. Preferred selectable markers include those which confer resistance to drugs, such as G418, hygromycin and methotrexate. Cells stably transfected with the introduced nucleic acid can be identified by drug selection (e.g., cells that have incorporated the selectable marker gene will survive, while the other cells die), among other methods.

[0224] Expression systems and constructs in the form of plasmids, expression vectors, transcription or expression cassettes that comprise at least one polynucleotide as described above are also provided herein, as well host cells comprising such expression systems or constructs.

[0225] The antigen binding proteins provided herein may be prepared by any of a number of conventional techniques. For example, GIPR antigen binding proteins may be produced by recombinant expression systems, using any technique known in the art. See, e.g., Monoclonal Antibodies, Hybridomas: A New Dimension in Biological Analyses, Kennet et al. (eds.) Plenum Press, New York (1980); and Antibodies: A Laboratory Manual, Harlow and Lane (eds.), Cold Spring Harbor Laboratory Press, Cold Spring Harbor, N.Y. (1988).

[0226] Antigen binding proteins can be expressed in hybridoma cell lines (e.g., in particular antibodies may be expressed in hybridomas) or in cell lines other than hybridomas. Expression constructs encoding the antibodies can be used to transform a mammalian, insect or microbial host cell. Transformation can be performed using any known method for introducing polynucleotides into a host cell, including, for example packaging the polynucleotide in a virus or bacteriophage and transducing a host cell with the construct by transfection procedures known in the art, as exemplified by U.S. Pat. Nos. 4,399,216; 4,912,040; 4,740,461; 4,959,455. The optimal transformation procedure used will depend upon which type of host cell is being transformed. Methods for introduction of heterologous polynucleotides into mammalian cells are well known in the art and include, but are not limited to, dextran-mediated transfection, calcium phosphate precipitation, polybrene mediated transfection, protoplast fusion, electroporation, encapsulation of the polynucleotide(s) in liposomes, mixing nucleic acid with positively-charged lipids, and direct microinjection of the DNA into nuclei.

[0227] Recombinant expression constructs typically comprise a nucleic acid molecule encoding a polypeptide comprising one or more of the following: one or more CDRs provided herein; a light chain constant region; a light chain variable region; a heavy chain constant region (e.g., C_{H}1, C_{H}2 and/or C_{H}3); and/or another scaffold portion of a GIPR antigen binding protein. These nucleic acid sequences are inserted into an appropriate expression vector using standard ligation techniques. In one embodiment, the heavy or light chain constant region is appended to the C-terminus of the anti-GIPR specific heavy or light chain variable region and is ligated into an expression vector. The vector is typically selected to be functional in the particular host cell employed (i.e., the vector is compatible with the host cell machinery, permitting amplification and/or expression of the gene can occur). In some embodiments, vectors are used that employ protein-fragment complementation assays using protein reporters, such as dihydrofolate reductase (see, for example, U.S. Pat. No. 6,270,964, which is hereby incorporated by reference). Suitable expression vectors can be purchased, for example, from Invitrogen Life Technologies or BD Biosciences (formerly “Clontech”). Other useful vectors for cloning and expressing the antibodies and fragments include those described in Bianchi and McGrew, 2003, Biotech. Biotechnol. Bioeng. 84:439-44, which is hereby incorporated by reference. Additional suitable expression vectors are discussed, for example, in Methods Enzymol., vol. 185 (D. V. Goeddel, ed.), 1990, New York: Academic Press.

[0228] Typically, expression vectors used in any of the host cells will contain sequences for plasmid maintenance and for cloning and expression of exogenous nucleotide sequences. Such sequences, collectively referred to as “flanking sequences” in certain embodiments will typically include one or more of the following nucleotide sequences: a promoter, one or more enhancer sequences, an origin of replication, a transcriptional termination sequence, a complete intron sequence containing a donor and acceptor splice site, a sequence encoding a leader sequence for polypeptide secretion, a ribosome binding site, a polyadenylation sequence, a polylinker region for inserting the nucleic acid encoding the polypeptide to be expressed, and a selectable marker element. Each of these sequences is discussed below.

[0229] Optionally, the vector may contain a “tag”-encoding sequence, i.e., an oligonucleotide molecule located at the 5′ or 3′ end of the GIPR antigen binding protein coding sequence; the oligonucleotide sequence encodes polyHis (such as hexaHis), or another “tag” such as FLAG®, HA (hemaglutinin influenza virus), or myc, for which commercially available antibodies exist. This tag is typically fused to the polypeptide upon expression of the polypeptide, and can serve as a means for affinity purification or detection of the GIPR antigen binding protein from the host cell. Affinity purification can be accomplished, for example, by column chromatography using antibodies against the tag as an affinity matrix. Optionally, the tag can subsequently be removed from the purified GIPR antigen binding protein by various means such as using certain peptidases for cleavage.

[0230] Flanking sequences may be homologous (i.e., from the same species and/or strain as the host cell), heterologous (i.e., from a species other than the host cell species or strain), hybrid (i.e., a combination of flanking sequences from more than one source), synthetic or native. As such, the source of a flanking sequence may be any prokaryotic or eukaryotic organism, any vertebrate or invertebrate organism, or any plant, provided that the flanking sequence is functional in, and can be activated by, the host cell machinery.

[0231] Flanking sequences useful in the vectors may be obtained by any of several methods well known in the art. Typically, flanking sequences useful herein will have been previously identified by mapping and/or by restriction endonuclease digestion and can thus be isolated from the proper tissue source using the appropriate restriction endonucleases. In some cases, the full nucleotide sequence of a flanking sequence may be known. Here, the flanking sequence may be synthesized using the methods described herein for nucleic acid synthesis or cloning.

[0232] Whether all or only a portion of the flanking sequence is known, it may be obtained using polymerase chain reaction (PCR) and/or by screening a genomic library with a suitable probe such as an oligonucleotide and/or flanking sequence fragment from the same or another species. Where the flanking sequence is not known, a fragment of DNA containing a flanking sequence may be isolated from a larger piece of DNA that may contain, for example, a coding sequence or even another gene or genes. Isolation may be accomplished by restriction endonuclease digestion to produce the proper DNA fragment followed by isolation using agarose gel purification, Qiagen® column chromatography (Chatsworth, Calif.), or other methods known to the skilled artisan. The selection of suitable enzymes to accomplish this purpose will be readily apparent to one of ordinary skill in the art.

[0233] An origin of replication is typically a part of those prokaryotic expression vectors purchased commercially, and the origin aids in the amplification of the vector in a host cell. If the vector of choice does not contain an origin of replication site, one may be chemically synthesized based on a known sequence, and ligated into the vector. For example, the origin of replication from the plasmid pBR322 (New England Biolabs, Beverly, Mass.) is suitable for most gram-negative bacteria, and various viral origins (e.g., SV40, polyoma, adenovirus, vesicular stomatitus virus (VSV), or papillomaviruses such as HPV or BPV) are useful for cloning vectors in mammalian cells. Generally, the origin of replication component is not needed for mammalian expression vectors (for example, the SV40 origin is often used only because it also contains the virus early promoter).

[0234] A transcription termination sequence is typically located 3′ to the end of a polypeptide coding region and serves to terminate transcription. Usually, a transcription termination sequence in prokaryotic cells is a G-C rich fragment followed by a poly-T sequence. While the sequence is easily cloned from a library or even purchased commercially as part of a vector, it can also be readily synthesized using methods for nucleic acid synthesis such as those described herein.

[0235] A selectable marker gene encodes a protein necessary for the survival and growth of a host cell grown in a selective culture medium. Typical selection marker genes encode proteins that (a) confer resistance to antibiotics or other toxins, e.g., ampicillin, tetracycline, or kanamycin for prokaryotic host cells; (b) complement auxotrophic deficiencies of the cell; or (c) supply critical nutrients not available from complex or defined media. Specific selectable markers are the kanamycin resistance gene, the ampicillin resistance gene, and the tetracycline resistance gene. Advantageously, a neomycin resistance gene may also be used for selection in both prokaryotic and eukaryotic host cells.

[0236] Other selectable genes may be used to amplify the gene that will be expressed. Amplification is the process wherein genes that are required for production of a protein critical for growth or cell survival are reiterated in tandem within the chromosomes of successive generations of recombinant cells. Examples of suitable selectable markers for mammalian cells include dihydrofolate reductase (DHFR) and promoterless thymidine kinase genes. Mammalian cell transformants are placed under selection pressure wherein only the transformants are uniquely adapted to survive by virtue of the selectable gene present in the vector. Selection pressure is imposed by culturing the transformed cells under conditions in which the concentration of selection agent in the medium is successively increased, thereby leading to the amplification of both the selectable gene and the DNA that encodes another gene, such as an antigen binding protein that binds GIPR polypeptide. As a result, increased quantities of a polypeptide such as an antigen binding protein are synthesized from the amplified DNA.

[0237] A ribosome-binding site is usually necessary for translation initiation of mRNA and is characterized by a Shine-Dalgamo sequence (prokaryotes) or a Kozak sequence (eukaryotes). The element is typically located 3′ to the promoter and 5′ to the coding sequence of the polypeptide to be expressed.

[0238] In some cases, such as where glycosylation is desired in a eukaryotic host cell expression system, one may manipulate the various pre- or pro-sequences to improve glycosylation or yield. For example, one may alter the peptidase cleavage site of a particular signal peptide, or add prosequences, which also may affect glycosylation. The final protein product may have, in the −1 position (relative to the first amino acid of the mature protein), one or more additional amino acids incident to expression, which may not have been totally removed. For example, the final protein product may have one or two amino acid residues found in the peptidase cleavage site, attached to the amino-terminus. Alternatively, use of some enzyme cleavage sites may result in a slightly truncated form of the desired polypeptide, if the enzyme cuts at such area within the mature polypeptide.

[0239] Expression and cloning will typically contain a promoter that is recognized by the host organism and operably linked to the molecule encoding the GIPR antigen binding protein. Promoters are untranscribed sequences located upstream (i.e., 5′) to the start codon of a structural gene (generally within about 100 to 1000 bp) that control transcription of the structural gene. Promoters are conventionally grouped into one of two classes: inducible promoters and constitutive promoters. Inducible promoters initiate increased levels of transcription from DNA under their control in response to some change in culture conditions, such as the presence or absence of a nutrient or a change in temperature. Constitutive promoters, on the other hand, uniformly transcribe a gene to which they are operably linked, that is, with little or no control over gene expression. A large number of promoters, recognized by a variety of potential host cells, are well known. A suitable promoter is operably linked to the DNA encoding heavy chain or light chain comprising a GIPR antigen binding protein by removing the promoter from the source DNA by restriction enzyme digestion and inserting the desired promoter sequence into the vector.

[0240] Suitable promoters for use with yeast hosts are also well known in the art. Yeast enhancers are advantageously used with yeast promoters. Suitable promoters for use with mammalian host cells are well known and include, but are not limited to, those obtained from the genomes of viruses such as polyoma virus, fowlpox virus, adenovirus (such as Adenovirus 2), bovine papilloma virus, avian sarcoma virus, cytomegalovirus, retroviruses, hepatitis-B virus, and Simian Virus 40 (SV40). Other suitable mammalian promoters include heterologous mammalian promoters, for example, heat-shock promoters and the actin promoter.

[0241] An enhancer sequence may be inserted into the vector to increase transcription of DNA encoding light chain or heavy chain comprising a GIPR antigen binding protein by higher eukaryotes. Enhancers are cis-acting elements of DNA, usually about 10-300 bp in length, that act on the promoter to increase transcription. Enhancers are relatively orientation and position independent, having been found at positions both 5′ and 3′ to the transcription unit. Several enhancer sequences available from mammalian genes are known (e.g., globin, elastase, albumin, alpha-feto-protein and insulin). Typically, however, an enhancer from a virus is used. The SV40 enhancer, the cytomegalovirus early promoter enhancer, the polyoma enhancer, and adenovirus enhancers known in the art are exemplary enhancing elements for the activation of eukaryotic promoters. While an enhancer may be positioned in the vector either 5′ or 3′ to a coding sequence, it is typically located at a site 5′ from the promoter. A sequence encoding an appropriate native or heterologous signal sequence (leader sequence or signal peptide) can be incorporated into an expression vector, to promote extracellular secretion of the antibody. The choice of signal peptide or leader depends on the type of host cells in which the antibody is to be produced, and a heterologous signal sequence can replace the native signal sequence. Examples of signal peptides that are functional in mammalian host cells include the following: the signal sequence for interleukin-7 (IL-7) described in U.S. Pat. No. 4,965,195; the signal sequence for interleukin-2 receptor described in Cosman et al., 1984, Nature 312:768; the interleukin-4 receptor signal peptide described in EP Patent No. 0367 566; the type I interleukin-1 receptor signal peptide described in U.S. Pat. No. 4,968,607; the type II interleukin-1 receptor signal peptide described in EP Patent No. 0 460 846.

[0242] In one embodiment the leader sequence comprises SEQ ID NO: 3157 (MDMRVPAQLL GLLLLWLRGA RC) which is encoded by SEQ ID NO: 3158 (atggacatga gagtgcctgc acagctgctg ggcctgctgc tgctgtggct gagaggcgcc agatgc). In another embodiment the leader sequence comprises SEQ ID NO: 3159 (MAWALLLLTL LTQGTGSWA) which is encoded by SEQ ID NO: 3160 (atggcctggg ctctgctgct cctcaccctc ctcactcagg gcacagggtc ctgggcc).

[0243] The expression vectors that are provided may be constructed from a starting vector such as a commercially available vector. Such vectors may or may not contain all of the desired flanking sequences. Where one or more of the flanking sequences described herein are not already present in the vector, they may be individually obtained and ligated into the vector. Methods used for obtaining each of the flanking sequences are well known to one skilled in the art.

[0244] After the vector has been constructed and a nucleic acid molecule encoding light chain, a heavy chain, or a light chain and a heavy chain comprising a GIPR antigen binding sequence has been inserted into the proper site of the vector, the completed vector may be inserted into a suitable host cell for amplification and/or polypeptide expression. The transformation of an expression vector for an antigen-binding protein into a selected host cell may be accomplished by well-known methods including transfection, infection, calcium phosphate co-precipitation, electroporation, microinjection, lipofection, DEAE-dextran mediated transfection, or other known techniques. The method selected will in part be a function of the type of host cell to be used. These methods and other suitable methods are well known to the skilled artisan, and are set forth, for example, in Sambrook et al., 2001, supra.

[0245] A host cell, when cultured under appropriate conditions, synthesizes an antigen binding protein that can subsequently be collected from the culture medium (if the host cell secretes it into the medium) or directly from the host cell producing it (if it is not secreted). The selection of an appropriate host cell will depend upon various factors, such as desired expression levels, polypeptide modifications that are desirable or necessary for activity (such as glycosylation or phosphorylation) and ease of folding into a biologically active molecule.

[0246] Mammalian cell lines available as hosts for expression are well known in the art and include, but are not limited to, immortalized cell lines available from the American Type Culture Collection (ATCC), including but not limited to Chinese hamster ovary (CHO) cells, HeLa cells, baby hamster kidney (BHK) cells, monkey kidney cells (COS), human hepatocellular carcinoma cells (e.g., Hep G2), and a number of other cell lines. In certain embodiments, cell lines may be selected through determining which cell lines have high expression levels and constitutively produce antigen binding proteins with GIPR binding properties. In another embodiment, a cell line from the B cell lineage that does not make its own antibody but has a capacity to make and secrete a heterologous antibody can be selected.

[0247] In one embodiment, the present invention is directed to an antigen binding protein produced by a cell expressing one or more of the polynucleotides identified in Tables 2, 3, 4, 5, 7, 8, 9, and 10.

[0248] In one aspect, a GIPR binding protein is administered for chronic treatment. In another aspect, the binding proteins are administered for acute therapy.

[0249] Pharmaceutical compositions that comprise a GIPR antigen binding protein are also provided and can be utilized in any of the preventive and therapeutic methods disclosed herein. In an embodiment, a therapeutically effective amount of one or a plurality of the antigen binding proteins and a pharmaceutically acceptable diluent, carrier, solubilizer, emulsifier, preservative, and/or adjuvant are also provided. Acceptable formulation materials are nontoxic to recipients at the dosages and concentrations employed.

[0250] In certain embodiments, the pharmaceutical composition may contain formulation materials for modifying, maintaining or preserving, for example, the pH, osmolarity, viscosity, clarity, color, isotonicity, odor, sterility, stability, rate of dissolution or release, adsorption or penetration of the composition. In such embodiments, suitable formulation materials include, but are not limited to, amino acids (such as glycine, glutamine, asparagine, arginine or lysine); antimicrobials; antioxidants (such as ascorbic acid, sodium sulfite or sodium hydrogen-sulfite); buffers (such as borate, bicarbonate, Tris-HCl, citrates, phosphates or other organic acids); bulking agents (such as mannitol or glycine); chelating agents (such as ethylenediamine tetraacetic acid (EDTA)); complexing agents (such as caffeine, polyvinylpyrrolidone, beta-cyclodextrin or hydroxypropyl-beta-cyclodextrin); fillers; monosaccharides; disaccharides; and other carbohydrates (such as glucose, mannose or dextrins); proteins (such as serum albumin, gelatin or immunoglobulins); coloring, flavoring and diluting agents; emulsifying agents; hydrophilic polymers (such as polyvinylpyrrolidone); low molecular weight polypeptides; salt-forming counterions (such as sodium); preservatives (such as benzalkonium chloride, benzoic acid, salicylic acid, thimerosal, phenethyl alcohol, methylparaben, propylparaben, chlorhexidine, sorbic acid or hydrogen peroxide); solvents (such as glycerin, propylene glycol or polyethylene glycol); sugar alcohols (such as mannitol or sorbitol); suspending agents; surfactants or wetting agents (such as pluronics, PEG, sorbitan esters, polysorbates such as polysorbate 20, polysorbate, triton, tromethamine, lecithin, cholesterol, tyloxapal); stability enhancing agents (such as sucrose or sorbitol); tonicity enhancing agents (such as alkali metal halides, preferably sodium or potassium chloride, mannitol sorbitol); delivery vehicles; diluents; excipients and/or pharmaceutical adjuvants. REMINGTON'S PHARMACEUTICAL SCIENCES, 18″ Edition, (A.R. Genrmo, ed.), 1990, Mack Publishing Company provides additional details and options for suitable agents that can be incorporated into the pharmaceutical compositions.

[0251] In certain embodiments, the optimal pharmaceutical composition will be determined by one skilled in the art depending upon, for example, the intended route of administration, delivery format and desired dosage. See, for example, REMINGTON'S PHARMACEUTICAL SCIENCES, supra. In certain embodiments, such compositions may influence the physical state, stability, rate of in vivo release and rate of in vivo clearance of the antigen binding proteins disclosed. In certain embodiments, the primary vehicle or carrier in a pharmaceutical composition may be either aqueous or non-aqueous in nature. For example, a suitable vehicle or carrier may be water for injection or physiological saline solution. In certain embodiments, GIPR antigen binding protein compositions may be prepared for storage by mixing the selected composition having the desired degree of purity with optional formulation agents (REMINGTON'S PHARMACEUTICAL SCIENCES, supra) in the form of a lyophilized cake or an aqueous solution. Further, in certain embodiments, the GIPR antigen binding protein may be formulated as a lyophilizate using appropriate excipients such as sucrose.

[0252] The pharmaceutical compositions can be selected for parenteral delivery. Alternatively, the compositions may be selected for inhalation or for delivery through the digestive tract, such as orally. Preparation of such pharmaceutically acceptable compositions is within the skill of the art.

[0253] The formulation components are present preferably in concentrations that are acceptable to the site of administration. In certain embodiments, buffers are used to maintain the composition at physiological pH or at a slightly lower pH, typically within a pH range of from about 5 to about 8.

[0254] When parenteral administration is contemplated, the therapeutic compositions may be provided in the form of a pyrogen-free, parenterally acceptable aqueous solution comprising the desired human GIPR antigen binding protein in a pharmaceutically acceptable vehicle. A particularly suitable vehicle for parenteral injection is sterile distilled water in which the GIPR antigen binding protein is formulated as a sterile, isotonic solution, properly preserved. In certain embodiments, the preparation can involve the formulation of the desired molecule with an agent, such as injectable microspheres, bio-erodible particles, polymeric compounds (such as polylactic acid or polyglycolic acid), beads or liposomes, that may provide controlled or sustained release of the product which can be delivered via depot injection. In certain embodiments, hyaluronic acid may also be used, having the effect of promoting sustained duration in the circulation. In certain embodiments, implantable drug delivery devices may be used to introduce the desired antigen binding protein.

[0255] Certain pharmaceutical compositions are formulated for inhalation. In some embodiments, GIPR antigen binding proteins are formulated as a dry, inhalable powder. In specific embodiments, GIPR antigen binding protein inhalation solutions may also be formulated with a propellant for aerosol delivery. In certain embodiments, solutions may be nebulized. Pulmonary administration and formulation methods therefore are further described in International Patent Application No. PCT/US94/001875, which is incorporated by reference and describes pulmonary delivery of chemically modified proteins. Some formulations can be administered orally. GIPR antigen binding proteins that are administered in this fashion can be formulated with or without carriers customarily used in the compounding of solid dosage forms such as tablets and capsules. In certain embodiments, a capsule may be designed to release the active portion of the formulation at the point in the gastrointestinal tract when bioavailability is maximized and pre-systemic degradation is minimized. Additional agents can be included to facilitate absorption of the GIPR antigen binding protein. Diluents, flavorings, low melting point waxes, vegetable oils, lubricants, suspending agents, tablet disintegrating agents, and binders may also be employed.

[0256] Some pharmaceutical compositions comprise an effective quantity of one or a plurality of GIPR antigen binding proteins in a mixture with non-toxic excipients that are suitable for the manufacture of tablets. By dissolving the tablets in sterile water, or another appropriate vehicle, solutions may be prepared in unit-dose form. Suitable excipients include, but are not limited to, inert diluents, such as calcium carbonate, sodium carbonate or bicarbonate, lactose, or calcium phosphate; or binding agents, such as starch, gelatin, or acacia; or lubricating agents such as magnesium stearate, stearic acid, or talc.

[0257] Additional pharmaceutical compositions will be evident to those skilled in the art, including formulations involving GIPR binding proteins in sustained- or controlled-delivery formulations. Techniques for formulating a variety of other sustained- or controlled-delivery means, such as liposome carriers, bio-erodible microparticles or porous beads and depot injections, are also known to those skilled in the art. See, for example, International Patent Application No. PCT/US93/00829, which is incorporated by reference and describes controlled release of porous polymeric microparticles for delivery of pharmaceutical compositions. Sustained-release preparations may include semipermeable polymer matrices in the form of shaped articles, e.g., films, or microcapsules. Sustained release matrices may include polyesters, hydrogels, polylactides (as disclosed in U.S. Pat. No. 3,773,919 and European Patent Application Publication No. EP 058481, each of which is incorporated by reference), copolymers of L-glutamic acid and gamma ethyl-L-glutamate (Sidman et al., 1983, Biopolymers 2:547-556), poly (2-hydroxyethyl-methacrylate) (Langer et al., 1981, J. Biomed. Mater. Res. 15:167-277 and Langer, 1982, Chem. Tech. 12:98-105), ethylene vinyl acetate (Langer et al., 1981, supra) or poly-D(−)-3-hydroxybutyric acid (European Patent Application Publication No. EP 133,988). Sustained release compositions may also include liposomes that can be prepared by any of several methods known in the art. See, e.g., Eppstein et al., 1985, Proc. Natl. Acad. Sci. U.S.A. 82:3688-3692; European Patent Application Publication Nos. EP 036,676; EP 088,046 and EP 143,949, incorporated by reference.

[0258] Pharmaceutical compositions used for in vivo administration are typically provided as sterile preparations. Sterilization can be accomplished by filtration through sterile filtration membranes. When the composition is lyophilized, sterilization using this method may be conducted either prior to or following lyophilization and reconstitution. Compositions for parenteral administration can be stored in lyophilized form or in a solution. Parenteral compositions generally are placed into a container having a sterile access port, for example, an intravenous solution bag or vial having a stopper pierceable by a hypodermic injection needle.

[0259] In certain formulations, an antigen binding protein has a concentration of at least 10 mg/mL, 20 mg/mL, 30 mg/mL, 40 mg/mL, 50 mg/mL, 60 mg/mL, 70 mg/mL, 80 mg/mL, 90 mg/mL, 100 mg/mL or 150 mg/mL. In one embodiment, a pharmaceutical composition comprises the antigen binding protein, a buffer and polysorbate. In other embodiments, the pharmaceutical composition comprises an antigen binding protein, a buffer, sucrose and polysorbate. An example of a pharmaceutical composition is one containing 50-100 mg/mL of antigen binding protein, 5-20 mM sodium acetate, 5-10% w/v sucrose, and 0.002-0.008% w/v polysorbate. Certain, compositions, for instance, contain 65-75 mg/mL of an antigen binding protein in 9-11 mM sodium acetate buffer, 8-10% w/v sucrose, and 0.005-0.006% w/v polysorbate. The pH of certain such formulations is in the range of 4.5-6. Other formulations have a pH of 5.0-5.5 (e.g., pH of 5.0, 5.2 or 5.4).

[0260] Once the pharmaceutical composition has been formulated, it may be stored in sterile vials as a solution, suspension, gel, emulsion, solid, crystal, or as a dehydrated or lyophilized powder. Such formulations may be stored either in a ready-to-use form or in a form (e.g., lyophilized) that is reconstituted prior to administration. Kits for producing a single-dose administration unit are also provided. Certain kits contain a first container having a dried protein and a second container having an aqueous formulation. In certain embodiments, kits containing single and multi-chambered pre-filled syringes (e.g., liquid syringes and lyosyringes) are provided. The therapeutically effective amount of a GIPR antigen binding protein-containing pharmaceutical composition to be employed will depend, for example, upon the therapeutic context and objectives. One skilled in the art will appreciate that the appropriate dosage levels for treatment will vary depending, in part, upon the molecule delivered, the indication for which the GIPR antigen binding protein is being used, the route of administration, and the size (body weight, body surface or organ size) and/or condition (the age and general health) of the patient. In certain embodiments, the clinician may titer the dosage and modify the route of administration to obtain the optimal therapeutic effect.

[0261] Dosing frequency will depend upon the pharmacokinetic parameters of the particular GIPR antigen binding protein in the formulation used. Typically, a clinician administers the composition until a dosage is reached that achieves the desired effect. The composition may therefore be administered as a single dose, or as two or more doses (which may or may not contain the same amount of the desired molecule) over time, or as a continuous infusion via an implantation device or catheter. Appropriate dosages may be ascertained through use of appropriate dose-response data. In certain embodiments, the antigen binding proteins can be administered to patients throughout an extended time period. In certain embodiments, the antigen binding protein is dosed every two weeks, every month, every two months, every three months, every four months, every five months, or every six months.

[0262] The route of administration of the pharmaceutical composition is in accord with known methods, e.g., orally, through injection by intravenous, intraperitoneal, intracerebral (intra-parenchymal), intracerebroventricular, intramuscular, intra-ocular, intraarterial, intraportal, or intralesional routes; by sustained release systems or by implantation devices. In certain embodiments, the compositions may be administered by bolus injection or continuously by infusion, or by implantation device.

[0263] The composition also may be administered locally via implantation of a membrane, sponge or another appropriate material onto which the desired molecule has been absorbed or encapsulated. In certain embodiments, where an implantation device is used, the device may be implanted into any suitable tissue or organ, and delivery of the desired molecule may be via diffusion, timed-release bolus, or continuous administration.

[0264] It also may be desirable to use GIPR antigen binding protein pharmaceutical compositions according to the disclosed ex vivo. In such instances, cells, tissues or organs that have been removed from the patient are exposed to GIPR antigen binding protein pharmaceutical compositions after which the cells, tissues and/or organs are subsequently implanted back into the patient.

[0265] A physician will be able to select an appropriate treatment indication and target lipid levels depending on the individual profile of a particular patient. One well-accepted standard for guiding treatment of hyperlipidemia is the Third Report of the National Cholesterol Education Program (NCEP) Expert Panel on Detection, Evaluation, and Treatment of the High Blood Cholesterol in Adults (Adult Treatment Panel III) Final Report, National Institutes of Health, NIH Publication No. 02-5215 (2002), the printed publication of which is hereby incorporated by reference in its entirety.

[0266] The efficacy of a particular dose can be assessed by reference to biomarkers or improvement in certain physiological parameters. Examples of suitable biomarkers include, the ratio of free cholesterol to plasma lipid, free cholesterol to membrane protein, phospatidylcholine to sphingomyelin, or HDL-C levels.

[0267] Also provided herein are compositions comprising a GIPR antigen binding protein and one or more additional therapeutic agents, as well as methods in which such agents are administered concurrently or sequentially with a GIPR antigen binding protein for use in the preventive and therapeutic methods disclosed herein. The one or more additional agents can be co-formulated with a GIPR antigen binding protein or can be co-administered with a GIPR antigen binding protein. In general, the therapeutic methods, compositions and compounds may also be employed in combination with other therapeutics in the treatment of various disease states, with the additional agents being administered concurrently.

[0268] Diagnostic applications provided herein include use of the antigen binding proteins to detect expression of GIPR. Examples of methods useful in the detection of the presence of GIPR include immunoassays, such as the enzyme linked immunosorbent assay (ELISA) and the radioimmunoassay (RIA).

[0269] For diagnostic applications, the antigen binding protein typically will be labeled with a detectable labeling group. Suitable labeling groups include, but are not limited to, the following: radioisotopes or radionuclides (e.g., ³H, ¹⁴C, ¹⁵N, ³⁵S, ⁹⁰Y, ⁹⁹Tc, ¹¹¹In, ¹²⁵I, ¹³¹I) fluorescent groups (e.g., FITC, rhodamine, lanthanide phosphors), enzymatic groups (e.g., horseradish peroxidase, β-galactosidase, luciferase, alkaline phosphatase), chemiluminescent groups, biotinyl groups, or predetermined polypeptide epitopes recognized by a secondary reporter (e.g., leucine zipper pair sequences, binding sites for secondary antibodies, metal binding domains, epitope tags). In some embodiments, the labeling group is coupled to the antigen binding protein via spacer arms of various lengths to reduce potential steric hindrance. Various methods for labeling proteins are known in the art and may be used.

[0270] In some embodiments, the GIPR antigen binding protein is isolated and measured using techniques known in the art. See, for example, Harlow and Lane, 1988, Antibodies: A Laboratory Manual, New York: Cold Spring Harbor (ed. 1991 and periodic supplements); John E. Coligan, ed., 1993, Current Protocols In Immunology New York: John Wiley & Sons.

[0271] Another aspect of the disclosed provides for detecting the presence of a test molecule that competes for binding to GIPR with the antigen binding proteins provided. An example of one such assay would involve detecting the amount of free antigen binding protein in a solution containing an amount of GIPR in the presence or absence of the test molecule. An increase in the amount of free antigen binding protein (i.e., the antigen binding protein not bound to GIPR) would indicate that the test molecule is capable of competing for GIPR binding with the antigen binding protein. In one embodiment, the antigen binding protein is labeled with a labeling group. Alternatively, the test molecule is labeled and the amount of free test molecule is monitored in the presence and absence of an antigen binding protein.

[0272] In application, Cushing's syndrome can be treated by administering a therapeutically effective dose of a GIPR binding protein to a patient in need thereof. The administration can be performed as described herein, such as by IV injection, intraperitoneal (IP) injection, subcutaneous injection, intramuscular injection, or orally in the form of a tablet or liquid formation. In some situations, a therapeutically effective or preferred dose of a GIPR binding protein can be determined by a clinician. A therapeutically effective dose of GIPR binding protein will depend, inter alia, upon the administration schedule, the unit dose of agent administered, whether the GIPR binding protein is administered in combination with other therapeutic agents, the immune status and the health of the recipient. The term “therapeutically effective dose,” as used herein, means an amount of GIPR binding protein that elicits a biological or medicinal response in a tissue system, animal, or human being sought by a researcher, medical doctor, or other clinician, which includes alleviation or amelioration of the symptoms of the disease or disorder being treated, i.e., an amount of a GIPR binding protein that supports an observable level of one or more desired biological or medicinal response, for example lowering cortisol levels.

[0273] It is noted that a therapeutically effective dose of a GIPR binding protein can also vary with the desired result. Thus, for example, in situations in which a lower level of cortisol is indicated a dose of GIPR binding protein will be correspondingly higher than a dose in which a comparatively higher level of cortisol is desired. Conversely, in situations in which a higher level of cortisol is indicated a dose of GIPR binding protein will be correspondingly lower than a dose in which a comparatively higher level of cortisol is desired.

[0274] In various embodiments, a subject is a human having a cortisol level of 50-100 μg/day or greater can be treated with a GIPR binding protein.

[0275] In one embodiment, a method of the instant disclosure comprises first measuring a baseline level of cortisol in a subject. A pharmaceutical composition comprising a GIPR binding protein is then administered to the subject. After a desired period of time, the level of cortisol in the subject is again measured. The two levels can then be compared in order to determine the relative change in cortisol levels in the subject. Depending on the outcome of that comparison another dose of the pharmaceutical composition comprising a GIPR binding protein can be administered to achieve a desired level of cortisol.

[0276] It is noted that a pharmaceutical composition comprising a GIPR binding protein can be co-administered with another compound. The identity and properties of compound co-administered with the GIPR binding protein will depend on the nature of the condition to be treated or ameliorated.

[0277] Also provided are kits for practicing the disclosed methods. Such kits can comprise a pharmaceutical composition such as those described herein, including nucleic acids encoding the peptides or proteins provided herein, vectors and cells comprising such nucleic acids, and pharmaceutical compositions comprising such nucleic acid-containing compounds, which can be provided in a sterile container. Optionally, instructions on how to employ the provided pharmaceutical composition in the treatment of Cushing's syndrome can also be included or be made available to a patient or a medical service provider.

[0278] In one aspect, a kit comprises (a) a pharmaceutical composition comprising a therapeutically effective amount of a GIPR binding protein; and (b) one or more containers for the pharmaceutical composition. Such a kit can also comprise instructions for the use thereof; the instructions can be tailored to the precise cortisol-related disorder being treated. The instructions can describe the use and nature of the materials provided in the kit. In certain embodiments, kits include instructions for a patient to carry out administration to treat Cushing's syndrome.

[0279] Instructions can be printed on a substrate, such as paper or plastic, etc., and can be present in the kits as a package insert, in the labeling of the container of the kit or components thereof (e.g., associated with the packaging), etc. In other embodiments, the instructions are present as an electronic storage data file present on a suitable computer readable storage medium, e.g. CD-ROM, diskette, etc. In yet other embodiments, the actual instructions are not present in the kit, but means for obtaining the instructions from a remote source, such as over the internet, are provided. An example of this embodiment is a kit that includes a web address where the instructions can be viewed and/or from which the instructions can be downloaded.

[0280] Often it will be desirable that some or all components of a kit are packaged in suitable packaging to maintain sterility. The components of a kit can be packaged in a kit containment element to make a single, easily handled unit, where the kit containment element, e.g., box or analogous structure, may or may not be an airtight container, e.g., to further preserve the sterility of some or all of the components of the kit.

### Example 1

[0281] Preparation of GIPR Agonist Peptide

[0282] Starting with a (G₄S)₃K(ivdde)-Rink amide resin subassembly (0.6 mmol, CEM), the remainder of the peptide (sequence: Y[Aib]EGTFISDYSIAMDKIHQQDFVNWLLAQKG-KKNDWKHNITQ) was built using DIC/Oxyma chemistry in DMF on a Protein Technologies Tribute peptide synthesizer and standard reagents for Fmoc-SPPS. For the final coupling in the sequence, Boc-Y(OtBu)-OH was utilized. For each coupling, 5 eq of DIC, Oxyma, and amino acid were used. Most couplings were performed at 75° C. with IR heating for 5 min (final Boc-Y coupling was performed at 50° C. for 25 min, both H couplings were performed at 50° C. for 10 min). Double-couplings were performed after each aromatic or beta-branched residue. Deprotections were performed at 50° C. with 20% 4-Me-piperidine in DMF.

[0283] After completion of the main chain, the resin was placed in a 100 mL synthesis vessel and washed with DMF (30 mL×2). The resin was treated with 5% Hydrazine in DMF (10 mL) and gently shaken at room temperature for 5 min. The solution was drained under vacuum and the deprotection was repeated 10 times. The resin was washed with DMF (100 mL×2) and DCM (100 mL×3).

[0284] In a separate vessel, a solution of DIC (0.935 mL, 6.00 mmol) in DMF (10 mL) was slowly added to a solution of bromoacetic acid (1.667 g, 12.00 mmol) in DCM (30 mL) (exotherm produced). The mixture was stirred at room temperature for 10 min then added to the previously deprotected resin. The reaction was shaken at room temperature for 18 h, then the solvent was drained, and the resin was washed with DCM (50 mL×4).

[0285] The resin was treated with TIPS (2 mL), water (2 mL) and TFA (40 mL). The mixture was kept at room temperature for 3 h with stirring. The cleavage solution was drained into a 250 mL RBF and concentrated to about half of the original volume on rotavap. Cold cyclopentylmethyl ether was added to the solution and the suspension was filtered and washed with more CPME yielding 2.55 g of crude material.

[0286] The crude peptide was dissolved in Water/MeCN (2:1) and injected onto a prep HPLC column (Phenomenex Gemini, 5μ, 250×30 mm (˜300 mg/injection), A: 0.1% TFA in H₂O, B: 0.1% TFA in CH₃CN). The column was eluted with a gradient of 20-40% B over 50 minutes with a 5-minute flush and 10-minute equilibration at a flow rate of 60 mL/min. The fractions were analyzed by LC-MS. The purification was repeated 10 times and the combined pool was lyophilized to give dry peptide. The peptide was dissolved in water and submitted for cation exchange purification (GE HiPrep 16/10 SP/HP column, 5 mL/min, A: 20 mM NaOAc, pH 5.0, B: 20 mM NaOAc, 1.0 M NaCl, pH 5.0, Gradient A-->B 0-50% over 50 min). The fractions were desalted using Amicon Ultra-15 spin concentrators (MWCO=3000) into water before being freeze-dried by lyophilization, yielding 136 mg of pure Y[Aib]EGTFISDYSIAMDKIHQQDFVNWLLAQKGKK-NDWKHNITQGGGGSGGGGSGGGGSK(BrAc)—NH₂. (71% pure by HPLC, m/z predicted: 1032.92; 1239.30; 1548.88, found: 1033.0, 1239.2, 1548.5)

[0287] Preparation of αDNP SEFL2 E273C Cys-mAb

[0288] Serum-free adapted CHO-K1 cells were transfected with plasmid DNA using a lipid-based transfection reagent. After antibiotic selection, a stable pool expressing the monoclonal antibody was propagated in proprietary in-house media. A ten-day fed-batch production was carried out in GE Wave bioreactor. In a separate flask, 100 ml GenScript AmMag Protein A Magnetic Beads are sanitized with 0.2 N sodium hydroxide, equilibrated and then slurried at 1:1 ratio in PBS, and finally added to the 25 L Wave Bag about 18 hours prior to harvesting. The following day, the magnetic Protein A beads are trapped in the Wave Bag with a plate magnet while the cells and spent media are drained. The 100 ml of Protein A beads are then resuspended in 2.5 L of PBS and drained into a bottle as the starting material for purification.

[0289] The Genscript AmMag Protein A Magnetic Beads in PBS are poured into a 10 L Conical Tank customized for magnetic bead processing. Magnetic beads are held within the tank with a ring magnet and the PBS is drained. Magnetic beads are then resuspended and washed 2× with 2.5 L of de-ionized water. The beads are next washed 3× with 2 L of 25 mM TRIS-HCl, 0.1 M sodium chloride, pH7.4 (TBS), followed by a final 5 L de-ionized water wash to remove all buffering components of the TBS in preparation for the elution step.

[0290] To elute the antibody, the beads are rinsed from the tank with 200 ml of 0.1 M sodium acetate, pH 3.6 into a 500 ml bottle and placed on a roller rack at 65 rpm for 15 minutes. The beads are held in the bottle with a small circular magnet while the elution is poured into another bottle. The elution is immediately neutralized with a 1% (v/v) addition of 3 M Tris Base. The elution step is repeated 3× to ensure full antibody elution from Protein A beads. The material was buffer-exchanged into 10 mM sodium acetate, 9% sucrose, pH 5.2. Heavy chain sequence (conjugation site underlined):

QVQLVESGGGVVQPGRSLRLSCAASGETFSSYGMHWVRQAPGKGLEWVAV
IWYDGSNKYYADSVKGRFTISRDNSKNTLYLQMNSLRAEDTAVYYCARYN
FNYGMDVWGQGTTVTVSSASTKGPSVFPLAPSSKSTSGGTAALGCLVKDY
FPEPVTVSWNSGALTSGVHTFPAVLQSSGLYSLSSVVTVPSSSLGTQTYI
CNVNHKPSNTKVDKKVEPKSCDKTHTCPPCPAPELLGGPSVFLFPPKPKD
TLMISRTPEVTCVVVDVSHEDPCVKFNWYVDGVEVHNAKTKPCEEQYGST
YRCVSVLTVLHQDWLNGKEYKCKVSNKALPAPIEKTISKAKGQPREPQVY
TLPPSREEMTKNQVSLTCLVKGFYPSDIAVEWESNGQPENNYKTTPPVLD
SDGSFFLYSKLTVDKSRWQQGNVFSCSVMHEALHNHYTQKSLSLSPGK

[0291] Light Chain Sequence:

DIQMTQSPSSVSASVGDRVTITCRASQGISRRLAWYQQKPGKAPKLLIYA
ASSLQSGVPSRESGSGSGTDFTLTISSLQPEDFATYYCQQANSFPFTFGP
GTKVDIKRTVAAPSVFIFPPSDEQLKSGTASVVCLLNNFYPREAKVQWKV
DNALQSGNSQESVTEQDSKDSTYSLSSTLTLSKADYEKHKVYACEVTHQG
LSSPVTKSFNRGEC

[0292] Preparation of Cysteamine-Capped αDNP SEFL2 E273C Cys-mAb

[0293] To a 500 mL bottle was added 300 mL of 2.5 mM cystamine, 2.5 mM cysteamine, 40 mM HEPES, pH 8.2 and αDNP SEFL2 E273C (197.5 ml, 10.9 mg/mL, 0.015 mmol). The mixture was shaken for 18 h at room temperature. The solution was filtered through a 0.2 um filter and diluted with 100 mM NaOAc, pH 5.0, then loaded directly onto the CEX column. The mixture was purified by cation exchange chromatography (GE 240 mL SP/HP, A: 20 mM NaOAc, pH 5.0, B: A+1.0 M NaCl, 0-30% over 10 CV, 20 mL/min). The fractions containing product were combined and buffer exchanged by TFF (Millipore Pellicon3, Ultracel 30 kDa Membrane, 88 cm²) into 10 mM sodium acetate, 9% sucrose, pH 5.2, yielding 450 mL of a solution of αDNP SEFL2 E273C Cys-mAb-CA cap at 4.3 mg/mL (90% yield). LC-TOF MS: Predicted 144510, found: 144485.

[0294] Preparation of HLE-GIPR Agonist

[0295] To a 1000 mL reservoir on a TFF instrument was added 10 mM sodium acetate, 9% sucrose, pH 5.2 (100 mL), αDNP SEFL2 E273C Cys-mAb-CA cap (232 ml, 6.88 μmol) and triphenylphosphine-3,3′,3″-trisulfonic acid trisodium salt (Sigma-Aldrich, 3.4 mM in H2O) (8.09 ml, 0.028 mmol). The mixture was gently stirred for 90 min at room temperature. When the reaction was complete by ion exchange chromatography, the solution was concentrated to 100 mL and buffer exchanged by TFF (30 kD MWCO, Millipore Ultracel membrane, 88 cm²) into 10 mM sodium acetate, 9% sucrose, pH 5.2. To the solution was added 150 mL of 50 mM sodium phosphate, 2 mM EDTA, pH 7.5, followed by dehydroascorbic acid (Biosynth International, 4.0 mM in 50 mM sodium phosphate, 2 mM EDTA, pH 7.5) (17.20 ml, 0.069 mmol). The re-oxidation was monitored by HPLC to minimize the amount of free light chain species in relation to fully intact Ab. When the reaction was sufficiently complete, GIPR agonist peptide (2.0 mM in H2O) (20.64 ml, 0.041 mmol) was added. The mixture was gently stirred at room temperature for 18 h. The solution was concentrated to 100 mL and buffer exchanged into A5Su using TFF (MWCO 30,000). The concentrated solution was recovered from the instrument with several washes. The solution was filtered through a 0.22 um filter and diluted with 2M ammonium sulfate, 20 mM NaOAc, pH 5.0. The solution was purified using hydrophobic interaction chromatography (Custom GE Sepharose butyl HP column, 159 mL, approx. 35 mm×200 mm). The solution was directly loaded onto the column with a sample loading pump. The desired compound was eluted under gradient conditions (12 mL/min, 100% A for 2 CV, 0-90% over 10 CV, hold for 2 CV, 100% for 2 CV, pure water for 2 CV, A: 1M ammonium sulfate, 20 mM NaOAc, pH 5.0, B: 20 mM NaOAc, 10% CH₃CN, pH 5.0). The fractions containing DAR2 were pooled, combined with identical product runs, concentrated, and buffer exchanged into 10 mM sodium acetate, 9% sucrose, pH 5.2 using TFF (30 kD MWCO, Millipore Ultracel membrane, 88 cm²). The purified product was collected with washes to give 302 mL of a 3.4 mg/mL solution. The final concentration was achieved by centrifugal ultrafiltration using Amicon Ultra-15 spin concentrators (30000 MWCO) followed by filtration through a 0.22 um syringe filter to give 52 mL of 19.4 mg/mL HLE-GIPR agonist solution (50% yield overall). 96.1% purity by SEC, LC-TOF MS: predicted: 156580, found: 156574.

[0296] Chronic Treatment with GIPR Agonist and muGIPR-Ab

[0297] DIO mice fed HFD for 12 weeks at the start of the study dosed with vehicle (saline 1×/day and vehicle 1× every 6 days), long-acting GIPR-Agonist (37.5 mg/kg LA-Agonist 1×/day and saline 1×/day), or anti-mouse anti-GIPR antibody 2.63.1 (muGIPR-Ab; 25 mg/kg muGIPR-Ab 1× every 6 days and saline 1×/day) for 21 days. On day 21, regular dosing followed by 4-hour fast, then TO RO bleed immediately followed by IP injections of [D-Ala2]-GIP (DA-GIP; 50 nmol/kg; Phoenix Pharmaceuticals)+glucose (2 g/kg) given to all mice with a retroorbital bleed at T15 min and terminal decapitation blood collection at T80 min, then tissues collected, weighed, and flash frozen.

(SEQ ID NO: 3161)
MKLPVRLLVL MFWIPASSSD VVMTQTPLSL PVSLGDQASI
SCRSSQSLVH SNGDTYLHWY LQKPGQSPKL LIYKVSNRFS
GVPDRFSGSG SGTDFTLKIS RVEAADLGVY FCSQSTHVPP
FTFGGGTKLE IKRADAAPTV SIFPPSSEQL TSGGASVVCF
LNNFYPKDIN VKWKIDGSER QNGVLNSWTD QDSKDSTYSM
SSTLTLTKDE YERHNSYTCE ATHKTSTSPI VKSFNRNEC

[0298] 2.63.1 comprises a light chain with the following sequence:

(SEQ ID NO: 3162)
MGWSYIILFL VATATDVHSQ VQLQQPGAEL VKPGASVKLS
CRASGYTFTS NWMHWVKQRP RQGLEWIGEI NPSNGRSNYN
EKFKTKATLT VDKSSSTAYM QLSSLTSEDS AVYYCARFYY
GTSWFAYWGQ GTLVAVSAAK TTPPSVYPLA PGSAAQTNSM
VTLGCLVKGY FPEPVTVTWN SGSLSSGVHT FPAVLQSDLY
TLSSSVTVPS STWPSETVTC NVAHPASSTK VDKKIVPRDC
GCKPCICTVP EVSSVFIFPP KPKDVLTITL TPKVTCVVVD
ISKDDPEVQF SWFVDDVEVH TAQTQPREEQ FASTFRSVSE
LPIMHQDWLN GKEFKCRVNS AAFPAPIEKT ISKTKGRPKA
PQVYTIPPPK EQMAKDKVSL TCMITDFFPE DITVEWQWNG
QPAENYKNTQ PIMDTDGSYF VYSKLNVQKS NWEAGNTFTC
SVLHEGLHNH HTEKSLSHSP GK.

[0299] Plasma and Epididymal WAT Metabolomics

[0300] Plasma and epididymal WAT metabolomics was performed by Metabolon using the Metabolon HD4 Platform. Samples were prepared using the automated MicroLab STARR system from Hamilton Company. Several recovery standards were added prior to the first step in the extraction process for QC purposes. Samples were extracted with methanol under vigorous shaking for 2 min (Glen Mills GenoGrinder 2000) to precipitate protein and dissociate small molecules bound to protein or trapped in the precipitated protein matrix, followed by centrifugation to recover chemically diverse metabolites. The resulting extract was divided into five fractions: two for analysis by two separate reverse phase (RP)/UPLC-MS/MS methods using positive ion mode electrospray ionization (ESI), one for analysis by RP/UPLC-MS/MS using negative ion mode ESI, one for analysis by HILIC/UPLC-MS/MS using negative ion mode ESI, and one reserved for backup. Samples were placed briefly on a TurboVap® (Zymark) to remove the organic solvent. The sample extracts were stored overnight under nitrogen before preparation for analysis. Several types of quality control samples were analyzed in concert with the experimental samples. These include: 1) technical replicate samples derived from a pool of well-characterized human plasma (MTRX), 2) extracted water samples (process blanks) and solvent blanks; and 3) a cocktail of QC standards, carefully chosen not to interfere with the measurement of endogenous compounds, spiked into every analyzed sample, allowing instrument performance monitoring and aiding with chromatographic alignment.

[0301] Ultrahigh Performance Liquid Chromatography-Tandem Mass Spectroscopy (UPLC-MS/MS): All methods utilize a Waters ACQUITY ultra-performance liquid chromatography (UPLC) and a Thermo Scientific Q-Exactive high resolution/accurate mass spectrometer interfaced with a heated electrospray ionization (HESI-II) source and Orbitrap mass analyzer operated at 35,000 mass resolution. The sample extract was dried then reconstituted in solvents compatible to each of the four methods. Each reconstitution solvent contains a series of standards at fixed concentrations to ensure injection and chromatographic consistency. One aliquot was analyzed using acidic positive ion conditions, chromatographically optimized for more hydrophilic compounds. In this method, the extract was gradient-eluted from a C18 column (Waters UPLC BEH C18-2.1×100 mm, 1.7 μm) using water and methanol, containing 0.05% perfluoropentanoic acid (PFPA) and 0.1% formic acid (FA). A second aliquot was also analyzed using acidic positive ion conditions but is chromatographically optimized for more hydrophobic compounds. In this method, the extract is gradient eluted from the aforementioned C18 column using methanol, acetonitrile, water, 0.05% PFPA and 0.01% FA, and was operated at an overall higher organic content. A third aliquot was analyzed using basic negative ion optimized conditions using a separate dedicated C18 column. The basic extracts are gradient-eluted from the column using methanol and water, however with 6.5 mM Ammonium Bicarbonate at pH 8. The fourth aliquot was analyzed via negative ionization following elution from a HILIC column (Waters UPLC BEH Amide 2.1×150 mm, 1.7 μm) using a gradient consisting of water and acetonitrile with 10 mM Ammonium Formate, pH 10.8. The MS analysis alternates between MS and data-dependent MSn scans using dynamic exclusion. The scan range varies slightly between methods, but covers approximately 70-1000 m/z.

[0302] Bioinformatics: The informatics system consists of four major components, the Laboratory Information Management System (LIMS), the data extraction and peak-identification software, data processing tools for QC and compound identification, and a collection of statistical, visualization, and interpretation tools for use by data analysts. The hardware and software foundations for these informatics components are the LAN backbone and database servers running Oracle 10.2.0.1 Enterprise Edition.

[0303] Data Extraction and Compound Identification: Raw data were extracted, peak-identified, and QC processed using Metabolon's hardware and software, Compounds were identified by comparison to library entries of purified standards or recurrent unknown entities. Metabolon maintains a library based on authenticated standards that contains the retention time/index (RI), mass to charge ratio (m/z), and chromatographic data (including MS/MS spectral data) on all molecules present in the library. Furthermore, biochemical identifications are based on three criteria: retention index within a narrow RI window of the proposed identification, accurate mass match to the library+/−10 ppm, and the MS/MS forward and reverse scores. MS/MS scores are based on a comparison of the ions present in the experimental spectrum to ions present in the library entry spectrum.

[0304] Curation: A variety of curation procedures are performed to ensure that a high-quality data set is made available for statistical analysis and data interpretation. The QC and curation processes are designed to ensure accurate and consistent identification of true chemical entities, and to remove those representing system artifacts, mis-assignments, redundancy, and background noise. Metabolon data analysts use internally-developed visualization and interpretation software to confirm the consistency of peak identification among the various samples. Library matches for each compound are checked for each sample and corrected if necessary. Peaks are quantified as area-under-the-curve detector ion counts.

[0305] Statistical Calculations: Welch's two-sample t-test is used to test whether two unknown means are different from two independent populations.

[0306] In Vivo GIP-Stimulated Corticosterone and Glycerol Secretion

[0307] DIO mice fed HFD for 12 weeks fasted for 10 hours overnight then at 7 am, blood sample collected by RO bleed then immediately IP injected with saline or DA-GIP in escalating doses, and blood collected by RO bleed over time as indicated. Plasma corticosterone (Alpco) was measured over time. DA-GIP EC90 for corticosterone secretion was calculated determined following nonlinear fit of data using a sigmoidal dose-response model with variable slope (GraphPad Prism). Subsequently, DIO mice fed HFD for 12 weeks were pre-treated with vehicle or muGIPR-Ab 24-hours before TO, fasted for 10 hours overnight then at 7 am, blood sample collected by RO bleed then immediately injected with saline or DA-GIP (80 nmol/kg), and blood collected by RO bleed as indicated. Plasma corticosterone was measured over time.

[0308] Statistical Analysis

[0309] All values are presented as mean±SEM. Repeated measures two-way ANOVA with Tukey's HSD was used to compare more than two groups over time. For metabolomics analysis, Welch's two-sample t-test was used to test whether two unknown means are different from two independent populations. One-way ANOVA with Sidak's test for multiple comparisons was used to compare three groups. Differences were considered significant when P<0.05. Data was analyzed using Graphpad Prism.

LENGTHY TABLES
The patent application contains a lengthy table section. A copy of the table is available in electronic form from the USPTO web site (https://seqdata.uspto.gov/?pageRequest=docDetail&DocID=US20220403038A1). An electronic copy of the table will also be available from the USPTO upon request and payment of the fee set forth in 37 CFR 1.19(b)(3).

The application's sequence listing, which the Patent Office published only in electronic form, follows.

SEQUENCE LISTING (4480 sequences)

SEQ ID NO: 1 - protein, 111 aa, Artificial Sequence
  source: /note="Description of Artificial Sequence: Synthetic polypeptide"
QSVLTQPPSASGTPGQRVTISCSGSSSNIGSNTVNWYQHLPGTAPKLLIYTNNQRPSGVPDRFSGSKSGTSASLAISGLQSEDEADYFCATFDDSLNGPVFGGGTKLTVLG

SEQ ID NO: 2 - protein, 108 aa, Artificial Sequence
  source: /note="Description of Artificial Sequence: Synthetic polypeptide"
DIQMTQSPSSLSASIGDRVTITCRASQDIRDYLGWYQQKPGKAPKRLIYGASSLQSGVPSRFSGSGSGTEFTLTISSLQPEDFATYYCLQHNNYPFTFGPGTKVDIKR

SEQ ID NO: 3 - protein, 108 aa, Artificial Sequence; identical to SEQ ID NO: 2
  source: /note="Description of Artificial Sequence: Synthetic polypeptide"

SEQ ID NO: 4 - protein, 107 aa, Artificial Sequence
  source: /note="Description of Artificial Sequence: Synthetic polypeptide"
DIQMTQSPSSLSASVGDRVTITCQASQDISNYLNWYQQKPGKAPKLLIYDASNLETGVPSRFSGSGSGTDFSFTISSLQPEDIATYYCQQYDILLTFGGGTKVEIKR

SEQ ID NO: 5 - protein, 114 aa, Artificial Sequence
  source: /note="Description of Artificial Sequence: Synthetic polypeptide"
DIVMTQSPDSLAVSLGERATINCKSSQSVLSSSNNKNYIAWYQQQPGHPPKLLIYWASTRESGVPDRFSGSGSGTDFTLTISSLQAEDVAVFYCQQYYSTPWTFGQGTKVEIKR

SEQ ID NO: 6 - protein, 114 aa, Artificial Sequence
  source: /note="Description of Artificial Sequence: Synthetic polypeptide"
DIVMTQSPDSLAVSLGERATINCKSSQSVLSSSNNKNYIAWYQQKPGHPPKLLIYWASTRESGVPDRFSGSGSGTDFTLTISSLQAEDVAVFYCQQYYSTPWTFGQGTKVEIKR

SEQ ID NO: 7 - protein, 114 aa, Artificial Sequence
  source: /note="Description of Artificial Sequence: Synthetic polypeptide"
DIVMTQSPDSLSVSLGERATINCKSSQSVLSSSNNKNYLAWYQQKPGQPPNLLIYWTSTRDSGVPDRFSGSGSGTDFTLTINSLQAEDVAVYYCQQYYRTPWTFGQGTKVEIKR

SEQ ID NO: 8 - protein, 114 aa, Artificial Sequence; identical to SEQ ID NO: 7
  source: /note="Description of Artificial Sequence: Synthetic polypeptide"

SEQ ID NO: 9 - protein, 109 aa, Artificial Sequence
  source: /note="Description of Artificial Sequence: Synthetic polypeptide"
EIVLTQSPGTLSLSPGERATLSCRASQSISYSYLAWYQQKPGQAPRLLIYGASSRATGIPDRFSGSGSGTDFTLTISRQEPDDFAVYYCQQYGSSPLTFGGGTKVEIKR

SEQ ID NO: 10 - protein, 108 aa, Artificial Sequence
  source: /note="Description of Artificial Sequence: Synthetic polypeptide"
EIVMTQSPATLSVSPGERATLSCRASQSVSSNLAWYQQKPGQAPRLLIYGAATRATGIPARVSGSGSGTEFTLTISSLQSEDFAVYYCQQYNNWPLTFGGGTKVEIKR

SEQ ID NO: 11 - protein, 108 aa, Artificial Sequence
  source: /note="Description of Artificial Sequence: Synthetic polypeptide"
DIQMTQSPSSLSASVGDRVTITCRASQGIRNELGWYQQKPGKAPKRLIYGASSLQSGVPSRFSGSGSGTEFTLTISSLQPEDFVTYYCLQHNSYPFTFGPGTKVDVKR

SEQ ID NO: 12 - protein, 107 aa, Artificial Sequence
  source: /note="Description of Artificial Sequence: Synthetic polypeptide"
DIQMTQSPSSLSASVGDRVTITCQASQDITNYLNWYQQKPGKAPKLLIYDASNLEPGVPSRFSGSGSGTDFTFTISSLQPEDIATYYCQQYDDLFTFGPGTKVDIKR

SEQ ID NO: 13 - protein, 108 aa, Artificial Sequence
  source: /note="Description of Artificial Sequence: Synthetic polypeptide"
DIQMTQSPSSVSASVGDRVTITCRASQGLIIWLAWYQQKPGKAPKLLIYAASSLQSGVPSRFSGSGSGTDFTLTISSLQPEDFATYYCQQTNSFPPTFGQGTKVEIKR

SEQ ID NO: 14 - protein, 108 aa, Artificial Sequence; identical to SEQ ID NO: 13
  source: /note="Description of Artificial Sequence: Synthetic polypeptide"

SEQ ID NO: 15 - protein, 108 aa, Artificial Sequence
  source: /note="Description of Artificial Sequence: Synthetic polypeptide"
DIQMTQSPSSLSASVGDRVTITCRASQGIRNELGWYQQKPGKAPKLLIYGASSLQSGVPSRFSGSGSGTEFTLTISSLQPEDFVTYYCLQHNSYPFTFGQGTKVDVKR

SEQ ID NO: 16 - protein, 108 aa, Artificial Sequence; identical to SEQ ID NO: 15
  source: /note="Description of Artificial Sequence: Synthetic polypeptide"

SEQ ID NO: 17 - protein, 108 aa, Artificial Sequence; identical to SEQ ID NO: 15
  source: /note="Description of Artificial Sequence: Synthetic polypeptide"

SEQ ID NO: 18 - protein, 108 aa, Artificial Sequence
  source: /note="Description of Artificial Sequence: Synthetic polypeptide"
DIQMTQSPSSLSASVGDRVTITCRASQGIRNELGWYQQKPGKAPKLLIYGASSLQSGVPSRFSGSGSGTEFTLTISSLQPEDFVTYYCLQHNSYPFTFGPGTKVDVKR

SEQ ID NO: 19 - protein, 108 aa, Artificial Sequence
  source: /note="Description of Artificial Sequence: Synthetic polypeptide"
DIQMTQSPSSLSASVGDRVTITCRASQGIRNELGWYQQKPGKAPKRLIYGASSLQSGVPSRFSGSGSGTEFTLTISSLQPEDFVTYYCLQHNSYPFTFGQGTKVDVKR

SEQ ID NO: 20 - protein, 108 aa, Artificial Sequence; identical to SEQ ID NO: 15
  source: /note="Description of Artificial Sequence: Synthetic polypeptide"

SEQ ID NO: 21 - protein, 108 aa, Artificial Sequence
  source: /note="Description of Artificial Sequence: Synthetic polypeptide"
DIQMTQSPSSLSASIGDRVTITCRASQDIRDYLGWYQQKPGKAPKLLIYGASSLQSGVPSRFSGSGSGTEFTLTISSLQPEDFATYYCLQHNNYPFTFGQGTKVDIKR

SEQ ID NO: 22 - protein, 108 aa, Artificial Sequence
  source: /note="Description of Artificial Sequence: Synthetic polypeptide"
DIQMTQSPSSLSASIGDRVTITCRASQDIRDYLGWYQQKPGKAPKRLIYGASSLQSGVPSRFSGSGSGTEFTLTISSLQPEDFATYYCLQHNNYPFTFGQGTKVDIKR

SEQ ID NO: 23 - protein, 108 aa, Artificial Sequence
  source: /note="Description of Artificial Sequence: Synthetic polypeptide"
DIQMTQSPSSLSASIGDRVTITCRASQDIRDYLGWYQQKPGKAPKLLIYGASSLQSGVPSRFSGSGSGTEFTLTISSLQPEDFATYYCLQHNNYPFTFGPGTKVDIKR

SEQ ID NO: 24 - protein, 108 aa, Artificial Sequence; identical to SEQ ID NO: 21
  source: /note="Description of Artificial Sequence: Synthetic polypeptide"

SEQ ID NO: 25 - protein, 108 aa, Artificial Sequence; identical to SEQ ID NO: 21
  source: /note="Description of Artificial Sequence: Synthetic polypeptide"

SEQ ID NO: 26 - protein, 108 aa, Artificial Sequence; identical to SEQ ID NO: 21
  source: /note="Description of Artificial Sequence: Synthetic polypeptide"

SEQ ID NO: 27 - protein, 108 aa, Artificial Sequence; identical to SEQ ID NO: 21
  source: /note="Description of Artificial Sequence: Synthetic polypeptide"

SEQ ID NO: 28 - protein, 108 aa, Artificial Sequence
  source: /note="Description of Artificial Sequence: Synthetic polypeptide"
DIQMTQSPSSLSASIGDRVTITCRASQDLRNYLGWYHQKPGKAPKRLIYGASSLQSGVPSRFSGSGSGTEFTLTISSLQPEDFATYYCLQHNNYPFTFGPGTKVDIKR

SEQ ID NO: 29 - protein, 108 aa, Artificial Sequence
  source: /note="Description of Artificial Sequence: Synthetic polypeptide"
DIQMTQSPSSLSASIGDRVTITCRASQDLRNYLGWYQQKPGKAPKLLIYGASSLQSGVPSRFSGSGSGTEFTLTISSLQPEDFATYYCLQHNNYPFTFGPGTKVDIKR

SEQ ID NO: 30 - protein, 108 aa, Artificial Sequence; identical to SEQ ID NO: 29
  source: /note="Description of Artificial Sequence: Synthetic polypeptide"

SEQ ID NO: 31 - protein, 108 aa, Artificial Sequence
  source: /note="Description of Artificial Sequence: Synthetic polypeptide"
DIQMTQSPSSLSASIGDRVTITCRASQDLRNYLGWYHQKPGKAPKLLIYGASSLQSGVPSRFSGSGSGTEFTLTISSLQPEDFATYYCLQHNNYPFTFGPGTKVDIKR

SEQ ID NO: 32 - protein, 108 aa, Artificial Sequence
  source: /note="Description of Artificial Sequence: Synthetic polypeptide"
DIQMTQSPSSLSASIGDRVTITCRASQDLRNYLGWYQQKPGKAPKRLIYGASSLQSGVPSRFSGSGSGTEFTLTISSLQPEDFATYYCLQHNNYPFTFGPGTKVDIKR

SEQ ID NO: 33 - protein, 108 aa, Artificial Sequence; identical to SEQ ID NO: 32
  source: /note="Description of Artificial Sequence: Synthetic polypeptide"

SEQ ID NO: 34 - protein, 108 aa, Artificial Sequence; identical to SEQ ID NO: 31
  source: /note="Description of Artificial Sequence: Synthetic polypeptide"

SEQ ID NO: 35 - protein, 108 aa, Artificial Sequence; identical to SEQ ID NO: 28
  source: /note="Description of Artificial Sequence: Synthetic polypeptide"

SEQ ID NO: 36 - protein, 108 aa, Artificial Sequence; identical to SEQ ID NO: 29
  source: /note="Description of Artificial Sequence: Synthetic polypeptide"

SEQ ID NO: 37 - protein, 108 aa, Artificial Sequence; identical to SEQ ID NO: 29
  source: /note="Description of Artificial Sequence: Synthetic polypeptide"

SEQ ID NO: 38 - protein, 108 aa, Artificial Sequence
  source: /note="Description of Artificial Sequence: Synthetic polypeptide"
DIQMTQSPSSLSASIGDRVTITCRASQDLRNYLGWYQQKPGKAPKLLIYGASSLQSGVPSRFSGSGSGTEFTLTISSLQPEDFATYYCLQHNNYPFTFGQGTKVDIKR

SEQ ID NO: 39 - protein, 108 aa, Artificial Sequence; identical to SEQ ID NO: 29
  source: /note="Description of Artificial Sequence: Synthetic polypeptide"

SEQ ID NO: 40 - protein, 107 aa, Artificial Sequence
  source: /note="Description of Artificial Sequence: Synthetic polypeptide"
DIQMTQSPSSLSASVGDRVTITCQASQDISNYLNWYQQKPGKAPKLLIYDASNLETGVPSRFSGSGSGTDFSLTISSLQPEDFATYYCQQYDILLTFGGGTKVEIKR

SEQ ID NO: 41 - protein, 107 aa, Artificial Sequence; identical to SEQ ID NO: 40
  source: /note="Description of Artificial Sequence: Synthetic polypeptide"

SEQ ID NO: 42 - protein, 107 aa, Artificial Sequence
  source: /note="Description of Artificial Sequence: Synthetic polypeptide"
DIQMTQSPSSLSASVGDRVTITCQASQDISNYLNWYQQKPGKAPKLLIYDASNLETGVPSRFSGSGSGTDFSLTISSLQPEDIATYYCQQYDILLTFGGGTKVEIKR

SEQ ID NO: 43 - protein, 107 aa, Artificial Sequence
  source: /note="Description of Artificial Sequence: Synthetic polypeptide"
DIQMTQSPSSLSASVGDRVTITCQASQDISNYLNWYQQKPGKAPKLLIYDASNLETGVPSRFSGSGSGTDFSFTISSLQPEDFATYYCQQYDILLTFGGGTKVEIKR

SEQ ID NO: 44 - protein, 107 aa, Artificial Sequence; identical to SEQ ID NO: 42
  source: /note="Description of Artificial Sequence: Synthetic polypeptide"

SEQ ID NO: 45 - protein, 107 aa, Artificial Sequence; identical to SEQ ID NO: 43
  source: /note="Description of Artificial Sequence: Synthetic polypeptide"

SEQ ID NO: 46 - protein, 107 aa, Artificial Sequence; identical to SEQ ID NO: 4
  source: /note="Description of Artificial Sequence: Synthetic polypeptide"

SEQ ID NO: 47 - protein, 107 aa, Artificial Sequence; identical to SEQ ID NO: 40
  source: /note="Description of Artificial Sequence: Synthetic polypeptide"

SEQ ID NO: 48 - protein, 107 aa, Artificial Sequence; identical to SEQ ID NO: 40
  source: /note="Description of Artificial Sequence: Synthetic polypeptide"

SEQ ID NO: 49 - protein, 108 aa, Artificial Sequence; identical to SEQ ID NO: 2
  source: /note="Description of Artificial Sequence: Synthetic polypeptide"

SEQ ID NO: 50 - protein, 108 aa, Artificial Sequence; identical to SEQ ID NO: 2
  source: /note="Description of Artificial Sequence: Synthetic polypeptide"

SEQ ID NO: 51 - protein, 108 aa, Artificial Sequence; identical to SEQ ID NO: 21
  source: /note="Description of Artificial Sequence: Synthetic polypeptide"

SEQ ID NO: 52 - protein, 108 aa, Artificial Sequence; identical to SEQ ID NO: 21
  source: /note="Description of Artificial Sequence: Synthetic polypeptide"

SEQ ID NO: 53 - protein, 108 aa, Artificial Sequence; identical to SEQ ID NO: 23
  source: /note="Description of Artificial Sequence: Synthetic polypeptide"

SEQ ID NO: 54 - protein, 108 aa, Artificial Sequence; identical to SEQ ID NO: 23
  source: /note="Description of Artificial Sequence: Synthetic polypeptide"

SEQ ID NO: 55 - protein, 108 aa, Artificial Sequence; identical to SEQ ID NO: 23
  source: /note="Description of Artificial Sequence: Synthetic polypeptide"

SEQ ID NO: 56 - protein, 107 aa, Artificial Sequence
  source: /note="Description of Artificial Sequence: Synthetic polypeptide"
DIQMTQSPSSLSASVGDRVTITCQASQDITNYLNWYQQKPGKAPKLLIYDASNLEPGVPSRFSGSGSGTDFTLTISSLQPEDFATYYCQQYDDLFTFGPGTKVDIKR

SEQ ID NO: 57 - protein, 107 aa, Artificial Sequence
  source: /note="Description of Artificial Sequence: Synthetic polypeptide"
DIQMTQSPSSLSASVGDRVTITCQASQDITNYLNWYQQKPGKAPKLLIYDASNLEPGVPSRFSGSGSGTDFTLTISSLQPEDIATYYCQQYDDLFTFGPGTKVDIKR

SEQ ID NO: 58 - protein, 107 aa, Artificial Sequence; identical to SEQ ID NO: 56
  source: /note="Description of Artificial Sequence: Synthetic polypeptide"

SEQ ID NO: 59 - protein, 107 aa, Artificial Sequence
  source: /note="Description of Artificial Sequence: Synthetic polypeptide"
DIQMTQSPSSLSASVGDRVTITCQASQDITNYLNWYQQKPGKAPKLLIYDASNLEPGVPSRFSGSGSGTDFTFTISSLQPEDFATYYCQQYDDLFTFGPGTKVDIKR

SEQ ID NO: 60 - protein, 107 aa, Artificial Sequence; identical to SEQ ID NO: 57
  source: /note="Description of Artificial Sequence: Synthetic polypeptide"

SEQ ID NO: 61 - protein, 107 aa, Artificial Sequence; identical to SEQ ID NO: 59
  source: /note="Description of Artificial Sequence: Synthetic polypeptide"

SEQ ID NO: 62 - protein, 107 aa, Artificial Sequence; identical to SEQ ID NO: 12
  source: /note="Description of Artificial Sequence: Synthetic polypeptide"

SEQ ID NO: 63 - protein, 107 aa, Artificial Sequence; identical to SEQ ID NO: 56
  source: /note="Description of Artificial Sequence: Synthetic polypeptide"

SEQ ID NO: 64 - protein, 107 aa, Artificial Sequence; identical to SEQ ID NO: 56
  source: /note="Description of Artificial Sequence: Synthetic polypeptide"

SEQ ID NO: 65 - protein, 107 aa, Artificial Sequence
  source: /note="Description of Artificial Sequence: Synthetic polypeptide"
DIQMTQSPSSLSASVGDRVTITCQASQDITNYLNWYQQKPGKAPKLLIYDASNLEPGVPSRFSGSGSGTDFTLTISSLQPEDFATYYCQQYDDLFTFGQGTKVDIKR

SEQ ID NO: 66 - protein, 107 aa, Artificial Sequence; identical to SEQ ID NO: 65
  source: /note="Description of Artificial Sequence: Synthetic polypeptide"

SEQ ID NO: 67 - protein, 108 aa, Artificial Sequence
  source: /note="Description of Artificial Sequence: Synthetic polypeptide"
EIVLTQSPGTLSLSPGERATLSCRASQIFTSTYLAWYQQKPGQAPRLLIYGASSRATGIPDRFSGSGSGTDFTLTISRLEPEDFAVYYCQQYGSSPRFGQGTRLEIKR

SEQ ID NO: 68 - protein, 108 aa, Artificial Sequence; identical to SEQ ID NO: 67
  source: /note="Description of Artificial Sequence: Synthetic polypeptide"

SEQ ID NO: 69 - protein, 108 aa, Artificial Sequence; identical to SEQ ID NO: 67
  source: /note="Description of Artificial Sequence: Synthetic polypeptide"

SEQ ID NO: 70 - protein, 108 aa, Artificial Sequence; identical to SEQ ID NO: 67
  source: /note="Description of Artificial Sequence: Synthetic polypeptide"

SEQ ID NO: 71 - protein, 108 aa, Artificial Sequence
  source: /note="Description of Artificial Sequence: Synthetic polypeptide"
EIVMTQSPATLSVSPGERATLSCRASQSVSSNLAWYQQKPGQAPRLLIYGAATRATGIPARFSGSGSGTEFTLTISSLQSEDFAVYYCQQYNNWPLTFGGGTKVEIKR

SEQ ID NO: 72 - protein, 108 aa, Artificial Sequence; identical to SEQ ID NO: 71
  source: /note="Description of Artificial Sequence: Synthetic polypeptide"

SEQ ID NO: 73 - protein, 108 aa, Artificial Sequence; identical to SEQ ID NO: 71
  source: /note="Description of Artificial Sequence: Synthetic polypeptide"

SEQ ID NO: 74 - protein, 108 aa, Artificial Sequence; identical to SEQ ID NO: 10
  source: /note="Description of Artificial Sequence: Synthetic polypeptide"

SEQ ID NO: 75 - protein, 108 aa, Artificial Sequence
  source: /note="Description of Artificial Sequence: Synthetic polypeptide"
EIVMTQSPATLSVSPGERATLSCRASQSVSSNLAWYQQKPGQAPRLLIYGAATRATGIPARFSGSGSGTEFTLTISSLEPEDFAVYYCQQYNNFPLTFGGGTKVEIKR

SEQ ID NO: 76 - protein, 108 aa, Artificial Sequence
  source: /note="Description of Artificial Sequence: Synthetic polypeptide"
EIVMTQSPATLSVSPGERATLSCRASQSVSSNLAWYQQKPGQAPRLLIYGAATRATGIPARFSGSGSGTEFTLTISSLEPEDFAVYYCQQYNNYPLTFGGGTKVEIKR

SEQ ID NO: 77 - protein, 108 aa, Artificial Sequence
  source: /note="Description of Artificial Sequence: Synthetic polypeptide"
EIVMTQSPATLSVSPGERATLSCRASQSVSSNLAWYQQKPGQAPRLLIYGAATRATGIPARFSGSGSGTEFTLTISSLEPEDFAVYYCQQYNNWPLTFGGGTKVEIKR

SEQ ID NO: 78 - protein, 108 aa, Artificial Sequence; identical to SEQ ID NO: 77
  source: /note="Description of Artificial Sequence: Synthetic polypeptide"

SEQ ID NO: 79 - protein, 109 aa, Artificial Sequence
  source: /note="Description of Artificial Sequence: Synthetic polypeptide"
EIVLTQSPGTLSLSPGERATLSCRASQSISYSYLAWYQQKPGQAPRLLIYGASSRATGIPDRFSGSGSGTDFTLTISRLEPDDFAVYYCQQYGSSPLTFGGGTKVEIKR

SEQ ID NO: 80 - protein, 109 aa, Artificial Sequence; identical to SEQ ID NO: 9
  source: /note="Description of Artificial Sequence: Synthetic polypeptide"

SEQ ID NO: 81 - protein, 109 aa, Artificial Sequence; identical to SEQ ID NO: 79
  source: /note="Description of Artificial Sequence: Synthetic polypeptide"

SEQ ID NO: 82 - protein, 109 aa, Artificial Sequence; identical to SEQ ID NO: 79
  source: /note="Description of Artificial Sequence: Synthetic polypeptide"

SEQ ID NO: 83 - protein, 109 aa, Artificial Sequence; identical to SEQ ID NO: 79
  source: /note="Description of Artificial Sequence: Synthetic polypeptide"

SEQ ID NO: 84 - protein, 109 aa, Artificial Sequence; identical to SEQ ID NO: 9
  source: /note="Description of Artificial Sequence: Synthetic polypeptide"

SEQ ID NO: 85 - protein, 109 aa, Artificial Sequence; identical to SEQ ID NO: 9
  source: /note="Description of Artificial Sequence: Synthetic polypeptide"

SEQ ID NO: 86 - protein, 114 aa, Artificial Sequence; identical to SEQ ID NO: 5
  source: /note="Description of Artificial Sequence: Synthetic polypeptide"

SEQ ID NO: 87 - protein, 114 aa, Artificial Sequence; identical to SEQ ID NO: 5
  source: /note="Description of Artificial Sequence: Synthetic polypeptide"

SEQ ID NO: 88 - protein, 114 aa, Artificial Sequence; identical to SEQ ID NO: 5
  source: /note="Description of Artificial Sequence: Synthetic polypeptide"

SEQ ID NO: 89 - protein, 114 aa, Artificial Sequence; identical to SEQ ID NO: 5
  source: /note="Description of Artificial Sequence: Synthetic polypeptide"

SEQ ID NO: 90 - protein, 114 aa, Artificial Sequence; identical to SEQ ID NO: 5
  source: /note="Description of Artificial Sequence: Synthetic polypeptide"

SEQ ID NO: 91 - protein, 114 aa, Artificial Sequence; identical to SEQ ID NO: 5
  source: /note="Description of Artificial Sequence: Synthetic polypeptide"

SEQ ID NO: 92 - protein, 114 aa, Artificial Sequence; identical to SEQ ID NO: 5
  source: /note="Description of Artificial Sequence: Synthetic polypeptide"

SEQ ID NO: 93 - protein, 114 aa, Artificial Sequence; identical to SEQ ID NO: 5
  source: /note="Description of Artificial Sequence: Synthetic polypeptide"

SEQ ID NO: 94 - protein, 114 aa, Artificial Sequence; identical to SEQ ID NO: 5
  source: /note="Description of Artificial Sequence: Synthetic polypeptide"

SEQ ID NO: 95 - protein, 114 aa, Artificial Sequence
  source: /note="Description of Artificial Sequence: Synthetic polypeptide"
DIVMTQSPDSLAVSLGERATINCKSSQSVLSSSNNKNYIAWYQQKPGQPPKLLIYWASTRESGVPDRFSGSGSGTDFTLTISSLQAEDVAVFYCQQYYSTPWTFGQGTKVEIKR

SEQ ID NO: 96 - protein, 114 aa, Artificial Sequence; identical to SEQ ID NO: 95
  source: /note="Description of Artificial Sequence: Synthetic polypeptide"

SEQ ID NO: 97 - protein, 114 aa, Artificial Sequence
  source: /note="Description of Artificial Sequence: Synthetic polypeptide"
DIVMTQSPDSLSVSLGERATINCKSSQSVLSSSNNKNYLAWYQQKPGQPPNLLIYWTSTRESGVPDRFSGSGSGTDFTLTINSLQAEDVAVYYCQQYYRTPWTFGQGTKVEIKR

SEQ ID NO: 98 - protein, 114 aa, Artificial Sequence; identical to SEQ ID NO: 97
  source: /note="Description of Artificial Sequence: Synthetic polypeptide"

SEQ ID NO: 99 - protein, 114 aa, Artificial Sequence; identical to SEQ ID NO: 7
  source: /note="Description of Artificial Sequence: Synthetic polypeptide"

SEQ ID NO: 100 - protein, 114 aa, Artificial Sequence; identical to SEQ ID NO: 97
  source: /note="Description of Artificial Sequence: Synthetic polypeptide"

SEQ ID NO: 101 - protein, 114 aa, Artificial Sequence; identical to SEQ ID NO: 97
  source: /note="Description of Artificial Sequence: Synthetic polypeptide"

SEQ ID NO: 102 - protein, 114 aa, Artificial Sequence; identical to SEQ ID NO: 7
  source: /note="Description of Artificial Sequence: Synthetic polypeptide"

SEQ ID NO: 103 - protein, 114 aa, Artificial Sequence; identical to SEQ ID NO: 7
  source: /note="Description of Artificial Sequence: Synthetic polypeptide"

SEQ ID NO: 104 - protein, 114 aa, Artificial Sequence
  source: /note="Description of Artificial Sequence: Synthetic polypeptide"
DIVMTQSPDSLAVSLGERATINCKSSQSVLSSSNNKNYLAWYQQKPGQPPKLLIYWTSTRESGVPDRFSGSGSGTDFTLTINSLQAEDVAVYYCQQYYRTPWTFGQGTKVEIKR

SEQ ID NO: 105 - protein, 114 aa, Artificial Sequence; identical to SEQ ID NO: 97
  source: /note="Description of Artificial Sequence: Synthetic polypeptide"

SEQ ID NO: 106 - protein, 114 aa, Artificial Sequence; identical to SEQ ID NO: 6
  source: /note="Description of Artificial Sequence: Synthetic polypeptide"

SEQ ID NO: 107 - protein, 114 aa, Artificial Sequence; identical to SEQ ID NO: 6
  source: /note="Description of Artificial Sequence: Synthetic polypeptide"

SEQ ID NO: 108 - protein, 114 aa, Artificial Sequence; identical to SEQ ID NO: 6
  source: /note="Description of Artificial Sequence: Synthetic polypeptide"

SEQ ID NO: 109 - protein, 114 aa, Artificial Sequence; identical to SEQ ID NO: 95
  source: /note="Description of Artificial Sequence: Synthetic polypeptide"

SEQ ID NO: 110 - protein, 114 aa, Artificial Sequence; identical to SEQ ID NO: 95
  source: /note="Description of Artificial Sequence: Synthetic polypeptide"

SEQ ID NO: 111 - protein, 114 aa, Artificial Sequence; identical to SEQ ID NO: 7
  source: /note="Description of Artificial Sequence: Synthetic polypeptide"

SEQ ID NO: 112 - protein, 114 aa, Artificial Sequence; identical to SEQ ID NO: 7
  source: /note="Description of Artificial Sequence: Synthetic polypeptide"

SEQ ID NO: 113 - protein, 114 aa, Artificial Sequence; identical to SEQ ID NO: 7
  source: /note="Description of Artificial Sequence: Synthetic polypeptide"

SEQ ID NO: 114 - protein, 114 aa, Artificial Sequence; identical to SEQ ID NO: 7
  source: /note="Description of Artificial Sequence: Synthetic polypeptide"

SEQ ID NO: 115 - protein, 114 aa, Artificial Sequence; identical to SEQ ID NO: 7
  source: /note="Description of Artificial Sequence: Synthetic polypeptide"

SEQ ID NO: 116 - protein, 114 aa, Artificial Sequence; identical to SEQ ID NO: 7
  source: /note="Description of Artificial Sequence: Synthetic polypeptide"

SEQ ID NO: 117 - protein, 114 aa, Artificial Sequence; identical to SEQ ID NO: 7
  source: /note="Description of Artificial Sequence: Synthetic polypeptide"

SEQ ID NO: 118 - protein, 114 aa, Artificial Sequence; identical to SEQ ID NO: 97
  source: /note="Description of Artificial Sequence: Synthetic polypeptide"

SEQ ID NO: 119 - protein, 114 aa, Artificial Sequence; identical to SEQ ID NO: 97
  source: /note="Description of Artificial Sequence: Synthetic polypeptide"

SEQ ID NO: 120 - protein, 114 aa, Artificial Sequence; identical to SEQ ID NO: 97
  source: /note="Description of Artificial Sequence: Synthetic polypeptide"

SEQ ID NO: 121 - protein, 114 aa, Artificial Sequence; identical to SEQ ID NO: 97
  source: /note="Description of Artificial Sequence: Synthetic polypeptide"

SEQ ID NO: 122 - protein, 114 aa, Artificial Sequence
  source: /note="Description of Artificial Sequence: Synthetic polypeptide"
DIVMTQSPDSLAVSLGERATINCKSSQSVLSSSNNKNYLAWYQQKPGQPPKLLIYWTSTRDSGVPDRFSGSGSGTDFTLTINSLQAEDVAVYYCQQYYRTPWTFGQGTKVEIKR

SEQ ID NO: 123 - protein, 114 aa, Artificial Sequence; identical to SEQ ID NO: 104
  source: /note="Description of Artificial Sequence: Synthetic polypeptide"

SEQ ID NO: 124 - protein, 111 aa, Artificial Sequence
  source: /note="Description of Artificial Sequence: Synthetic polypeptide"
QSVLTQPPSASGTPGQRVTISCSGSSSNIGSQTVNWYQHLPGTAPKLLIYTNNQRPSGVPDRFSGSKSGTSASLAISGLQSEDEADYFCATFDESLSGPVFGGGTKLTVLG

SEQ ID NO: 125 - protein, 111 aa, Artificial Sequence
  source: /note="Description of Artificial Sequence: Synthetic polypeptide"
QSVLTQPPSASGTPGQRVTISCSGSSSNIGSQTVNWYQHLPGTAPKLLIYTNNQRPSGVPDRFSGSKSGTSASLAISGLQSEDEADYFCATFDESLQGPVFGGGTKLTVLG

SEQ ID NO: 126 - protein, 111 aa, Artificial Sequence
  source: /note="Description of Artificial Sequence: Synthetic polypeptide"
QSVLTQPPSASGTPGQRVTISCSGSSSNIGSNYVNWYQHLPGTAPKLLIYTNNQRPSGVPDRFSGSKSGTSASLAISGLQSEDEADYFCATFDESLSGPVFGGGTKLTVLG

SEQ ID NO: 127 - protein, 111 aa, Artificial Sequence
  source: /note="Description of Artificial Sequence: Synthetic polypeptide"
QSVLTQPPSASGTPGQRVTISCSGSSSNIGSNYVNWYQHLPGTAPKLLIYTNNQRPSGVPDRFSGSKSGTSASLAISGLQSEDEADYFCATFDESLQGPVFGGGTKLTVLG

SEQ ID NO: 128 - protein, 111 aa, Artificial Sequence
  source: /note="Description of Artificial Sequence: Synthetic polypeptide"
QSVLTQPPSASGTPGQRVTISCSGSSSNIGSQTVNWYQHLPGTAPKLLIYTNNQRPSGVPDRFSGSKSGTSASLAISGLQSEDEADYFCATFDDSLNGPVFGGGTKLTVLG

SEQ ID NO: 129 - protein, 111 aa, Artificial Sequence
  source: /note="Description of Artificial Sequence: Synthetic polypeptide"
QSVLTQPPSASGTPGQRVTISCSGSSSNIGSNYVNWYQHLPGTAPKLLIYTNNQRPSGVPDRFSGSKSGTSASLAISGLQSEDEADYFCATFDDSLNGPVFGGGTKLTVLG

SEQ ID NO: 130 - protein, 111 aa, Artificial Sequence
  source: /note="Description of Artificial Sequence: Synthetic polypeptide"
QSVLTQPPSASGTPGQRVTISCSGSSSNIGSNTVNWYQHLPGTAPKLLIYTNNQRPSGVPDRFSGSKSGTSASLAISGLQSEDEADYFCATFDESLNGPVFGGGTKLTVLG

SEQ ID NO: 131 - protein, 111 aa, Artificial Sequence
  source: /note="Description of Artificial Sequence: Synthetic polypeptide"
QSVLTQPPSASGTPGQRVTISCSGSSSNIGSNTVNWYQHLPGTAPKLLIYTNNQRPSGVPDRFSGSKSGTSASLAISGLQSEDEADYFCATFDDSLQGPVFGGGTKLTVLG

SEQ ID NO: 132 - protein, 111 aa, Artificial Sequence
  source: /note="Description of Artificial Sequence: Synthetic polypeptide"
QSVLTQPPSASGTPGQRVTISCSGSSSNIGSNTVNWYQHLPGTAPKLLIYTNNQRPSGVPDRFSGSKSGTSASLAISGLQSEDEADYFCATFDDSLSGPVFGGGTKLTVLG

SEQ ID NO: 133 - protein, 111 aa, Artificial Sequence
  source: /note="Description of Artificial Sequence: Synthetic polypeptide"
QSVLTQPPSASGTPGQRVTISCSGSSSNIGSNTVNWYQHLPGTAPKLLIYTNNQRPSGVPDRFSGSKSGTSASLAISGLQSEDEADYFCATFDDSLNAPVFGGGTKLTVLG

SEQ ID NO: 134 - protein, 111 aa, Artificial Sequence
  source: /note="Description of Artificial Sequence: Synthetic polypeptide"
QSVLTQPPSASGTPGQRVTISCSGSSSNIGSNTVNWYQHLPGTAPKLLIYTNNQRPSGVPDRFSGSKSGTSASLAISGLQSEDEADYFCATFDSSLNGPVFGGGTKLTVLG

SEQ ID NO: 135 - protein, 111 aa, Artificial Sequence
  source: /note="Description of Artificial Sequence: Synthetic polypeptide"
QSVLTQPPSASGTPGQRVTISCSGSSSNIGSNYVNWYQHLPGTAPKLLIYTNNQRPSGVPDRFSGSKSGTSASLAISGLQSEDEADYFCATFDSSLNAPVFGGGTKLTVLG

SEQ ID NO: 136 - protein, 111 aa, Artificial Sequence; identical to SEQ ID NO: 135
  source: /note="Description of Artificial Sequence: Synthetic polypeptide"

SEQ ID NO: 137 - protein, 111 aa, Artificial Sequence; identical to SEQ ID NO: 124
  source: /note="Description of Artificial Sequence: Synthetic polypeptide"

SEQ ID NO: 138 - protein, 108 aa, Artificial Sequence
  source: /note="Description of Artificial Sequence: Synthetic polypeptide"
DIQMTQSPSSLSASIGDRVTITCRASQDLRNYLGWYQQKPGKAPKRLIYGASSLQSGVPSRFSGSGSGTEFTLTISSLQPEDFATYYCLQHNNYPFTFGQGTKVDIKR

SEQ ID NO: 139 - protein, 108 aa, Artificial Sequence; identical to SEQ ID NO: 22
  source: /note="Description of Artificial Sequence: Synthetic polypeptide"

SEQ ID NO: 140 - protein, 111 aa, Artificial Sequence
  source: /note="Description of Artificial Sequence: Synthetic polypeptide"
QSVLTQPPSASGTPGQRVTISCSGSSSNIGSNTVNWYQQLPGTAPKLLIYTNNQRPSGVPDRFSGSKSGTSASLAISGLQSEDEADYFCATFDSSLSGPVFGGGTKLTVLG

SEQ ID NO: 141 - protein, 108 aa, Artificial Sequence
  source: /note="Description of Artificial Sequence: Synthetic polypeptide"
DIQLTQSPSSLSASVGDRVTITCRASQTISRFLNWYQQKPGKAPELLIYVASSLQSGVPSRFSGSGSGTDFTLTISSLQPEDFATYYCQQSYSTLISFGQGTKLEITR

SEQ ID NO: 142 - protein, 111 aa, Artificial Sequence
  source: /note="Description of Artificial Sequence: Synthetic polypeptide"
QSVLTQPPSVSAAPGQKVTISCSGSSSNIGNNYVSWYEQFPGTAPKLLIYDNNKRPSGIPDRFSGSKSGTSATLGITGLQTGDEADYYCGTWDSSLSAVVFGGGTKLTVLG

SEQ ID NO: 143 - protein, 108 aa, Artificial Sequence
  source: /note="Description of Artificial Sequence: Synthetic polypeptide"
DIQLTQSPSSLSASVGDRVTITCRASQTISRFLNWYQQKPGKAPELLIYVASSLQSGVPSRFSGSGSGTDFTLTISSLQPEDFATYYCQQSYSTLISFGQGTKLEIKR

SEQ ID NO: 144 - protein, 108 aa, Artificial Sequence; identical to SEQ ID NO: 143
  source: /note="Description of Artificial Sequence: Synthetic polypeptide"

SEQ ID NO: 145 - protein, 108 aa, Artificial Sequence; identical to SEQ ID NO: 141
  source: /note="Description of Artificial Sequence: Synthetic polypeptide"

SEQ ID NO: 146 - protein, 108 aa, Artificial Sequence
  source: /note="Description of Artificial Sequence: Synthetic polypeptide"
DIQLTQSPSSLSASVGDRVTITCRASQTISRFLNWYQQKPGKAPKLLIYVASSLQSGVPSRFSGSGSGTDFTLTISSLQPEDFATYYCQQSYSTLISFGQGTKLEIKR

SEQ ID NO: 147 - protein, 108 aa, Artificial Sequence; identical to SEQ ID NO: 143
  source: /note="Description of Artificial Sequence: Synthetic polypeptide"

SEQ ID NO: 148 - protein, 108 aa, Artificial Sequence; identical to SEQ ID NO: 143
  source: /note="Description of Artificial Sequence: Synthetic polypeptide"

SEQ ID NO: 149 - protein, 111 aa, Artificial Sequence
  source: /note="Description of Artificial Sequence: Synthetic polypeptide"
QSVLTQPPSVSAAPGQKVTISCSGSSSNIGNNYVSWYQQLPGTAPKLLIYDNNKRPSGIPDRFSGSKSGTSATLGITGLQTGDEADYYCGTWDSSLSAVVFGGGTKLTVLG

SEQ ID NO: 150 - protein, 111 aa, Artificial Sequence; identical to SEQ ID NO: 149
  source: /note="Description of Artificial Sequence: Synthetic polypeptide"

SEQ ID NO: 151 - protein, 111 aa, Artificial Sequence; identical to SEQ ID NO: 142
  source: /note="Description of Artificial Sequence: Synthetic polypeptide"

SEQ ID NO: 152 - protein, 111 aa, Artificial Sequence
  source: /note="Description of Artificial Sequence: Synthetic polypeptide"
QSVLTQPPSVSAAPGQKVTISCSGSSSNIGNNYVSWYQQLPGTAPKLLIYDNNKRPSGIPDRFSGSKSGTSATLAITGLQTGDEADYYCGTFESSLSAVVFGGGTKLTVLG

SEQ ID NO: 153 - protein, 111 aa, Artificial Sequence
  source: /note="Description of Artificial Sequence: Synthetic polypeptide"
QSVLTQPPSVSAAPGQKVTISCSGSSSNIGNNYVSWYQQLPGTAPKLLIYDNNKRPSGIPDRFSGSKSGTSATLAITGLQTGDEADYYCGTWDSSLSAVVFGGGTKLTVLG

SEQ ID NO: 154 - protein, 111 aa, Artificial Sequence; identical to SEQ ID NO: 153
  source: /note="Description of Artificial Sequence: Synthetic polypeptide"

SEQ ID NO: 155 - protein, 111 aa, Artificial Sequence; identical to SEQ ID NO: 149
  source: /note="Description of Artificial Sequence: Synthetic polypeptide"

SEQ ID NO: 156 - protein, 111 aa, Artificial Sequence; identical to SEQ ID NO: 152
  source: /note="Description of Artificial Sequence: Synthetic polypeptide"

SEQ ID NO: 157 - protein, 108 aa, Artificial Sequence
  source: /note="Description of Artificial Sequence: Synthetic polypeptide"
DIQLTQSPSSLSASVGDRVTITCRASQTISRFLNWYQQKPGKAPKLLIYVASSLQSGVPSRFSGSGSGTDFTLTISSLQPEDFATYYCQQSYSTLLSFGQGTKLEIKR

SEQ ID NO: 158 - protein, 128 aa, Artificial Sequence
  source: /note="Description of Artificial Sequence: Synthetic polypeptide"
QMQVVQSGAEVKKPGASVKVSCKASGYTFTGYYMHWVRQAPGQGLEWMGWINPNSGGTNYAQKFQGRVTMTRDTSISTAYMELSRLRSDDTAVYYCARGGDYVWGTYRPHYYYGMDVWGQGTTVTVSS

SEQ ID NO: 159 - protein, 121 aa, Artificial Sequence
  source: /note="Description of Artificial Sequence: Synthetic polypeptide"
QVQLVESGGGVVQPGRSLRLSCAASGFTFSNFGMHWVRQAPGKGLEWVAVIWYDGSNENYADSVKGRFTISRDNSKNTLYLHMNSLRVADTAVYYCARDGTIFGVVLGDYWGQGTLVTVSS

SEQ ID NO: 160 - protein, 121 aa, Artificial Sequence
  source: /note="Description of Artificial Sequence: Synthetic polypeptide"
QVQLVESGGGVVQPGRSLRLSCAASGFTFSYFGMHWVRQAPGKGLEWVAVIWYDGSNKYYADSVKGRFTISRDNSKNTLYLQMNSLRAEDTAVYYCARDGTIFGVLLGDYWGQGTLVTVSS

SEQ ID NO: 161 - protein, 120 aa, Artificial Sequence
  source: /note="Description of Artificial Sequence: Synthetic polypeptide"
QVQLVESGGGVVQPGRSLRLSCAASGFTFSSYGMHWVRQAPGKGLEWVAVIWYDGSNKYYADSVKGRFTISSDNSKNTLYLQMNSLRAEDTAVYYCARDRTIFGVVLDYWGQGTLVTVSS

SEQ ID NO: 162 - protein, 123 aa, Artificial Sequence
  source: /note="Description of Artificial Sequence: Synthetic polypeptide"
QVPLVQSGAEVKKPGASVKVSCKASGYTFTGYYIHWVRQAPGQGLEWMGWINPDSGGTDYSQRFQGRFTMTRDTSISTAYMELNRLRSDDTAVYYCAREATIFGMVIVPFDYWGQGTLVTVSS

SEQ ID NO: 163 - protein, 123 aa, Artificial Sequence
  source: /note="Description of Artificial Sequence: Synthetic polypeptide"
QVPLVQSGAEVKKPGASVKVSCKASGYTFTGYYIHWVRQAPGQGLEWMGWINPDSGGTDYSQRFQGRFTMTRDTSISTAYMELSRLRSDDTAVYYCAREATIFGMVIVPFDYWGQGTLVTVSS

SEQ ID NO: 164 - protein, 123 aa, Artificial Sequence
  source: /note="Description of Artificial Sequence: Synthetic polypeptide"
QVPLVQSGAEVKKPGASVKVSCKASGYTFTGYYIHWVRQAPGQGLVWMGWISPNSGDTSYAQKFQDRVTMTRDTSISTAYMELSRLRSDDTAVYFCTREATIFGMLIVPFDYWGQGTLVTVSS

SEQ ID NO: 165 - protein, 123 aa, Artificial Sequence
  source: /note="Description of Artificial Sequence: Synthetic polypeptide"
QVPLVQSGAEVKKPGASVKVSCKASGYTFTGYYIHWVRQAPGQGLEWMGWISPNNGDTNYAQKFQDRVTMTRDTSISTAYMELSRLRSDDTAVYYCTREATIFGMLIVPFDYWGQGTLVTVSS

SEQ ID NO: 166 - protein, 126 aa, Artificial Sequence
  source: /note="Description of Artificial Sequence: Synthetic polypeptide"
QVQLQESGPGLVKPSQTLSLTCTVSGDSISSGGYYWSWIRQHPGKGLEWIGYIYYSGSTYYNPSLKSRVTISVDTSKNQFSLKLSSVTAADTAVYYCARDRITIFGVVMGGGMDVWGQGTTVTVSS

SEQ ID NO: 167 - protein, 120 aa, Artificial Sequence
  source: /note="Description of Artificial Sequence: Synthetic polypeptide"
QVQLVESGGGVVQPGRSLRLSCAASGFTFSNYGMHWVRQAPGEGLEWVAAIWFDGSDKYYADSVKGRFTISRDNSKNTLYLQMNSLRAEDTAVYYCARDQAIFGVVPDYWGQGTLVTVSS

SEQ ID NO: 168 - protein, 121 aa, Artificial Sequence; identical to SEQ ID NO: 160
  source: /note="Description of Artificial Sequence: Synthetic polypeptide"

SEQ ID NO: 169 - protein, 120 aa, Artificial Sequence
  source: /note="Description of Artificial Sequence: Synthetic polypeptide"
QVQLVESGGGVVQPGRSLRLSCAASGFSFSSYGMHWVRQPPGKGLEWVAAIWYDGNNKYYADSVKGRFTISRDSSKNTLYLQMNSLRAEDTAVYYCARDRTIFGVVLEYLGQGTLVTVSS

SEQ ID NO: 170 - protein, 117 aa, Artificial Sequence
  source: /note="Description of Artificial Sequence: Synthetic polypeptide"
QVQLQESGPGLVKPSETLSLTCTVSQGSISSYYWSWIRQPAGKGLEWIGRIYTSGSTNYNPSLKSRVTMSIDTSKNQFSLKLNSVTAADTAVYYCARDVAVAGFDYWGQGTLVTVSS

SEQ ID NO: 171 - protein, 117 aa, Artificial Sequence
  source: /note="Description of Artificial Sequence: Synthetic polypeptide"
QVQLQESGPGLVKPSETLSLTCTVSGGSISSYYWSWIRQPAGKGLEWIGRIYTSGSTNYNPSLKSRVTMSIDTSKNQFSLKLNSVTAADTAVYYCARDVAVAGFDYWGQGTLVTVSS

SEQ ID NO: 172 - protein, 121 aa, Artificial Sequence
  source: /note="Description of Artificial Sequence: Synthetic polypeptide"
QVQLVESGGGVVQPGRSLRLSCAASGFTFSYFGMHWVRQAPGKGLEWVAVIWYDASNKYYADAVKGRFTISRDNSKNTLYLQMNSLRAEDTAVYYCARDGTIFGVLLGDYWGQGTLVTVSS

SEQ ID NO: 173 - protein, 121 aa, Artificial Sequence
  source: /note="Description of Artificial Sequence: Synthetic polypeptide"
QVQLVESGGGVVQPGRSLRLSCAASGFTFSYFGMHWVRQAPGKGLEWVAVIWYDASNKYYADSVKGRFTISRDNSKNTLYLQMNSLRAEDTAVYYCARDGTIFGVLLGDYWGQGTLVTVSS

SEQ ID NO: 174 - protein, 121 aa, Artificial Sequence
  source: /note="Description of Artificial Sequence: Synthetic polypeptide"
QVQLVESGGGVVQPGRSLRLSCAASGFTFSYFGMHWVRQAPGKGLEWVAVIWYDGSNKYYADAVKGRFTISRDNSKNTLYLQMNSLRAEDTAVYYCARDGTIFGVLLGDYWGQGTLVTVSS

SEQ ID NO: 175 - protein, 121 aa, Artificial Sequence; identical to SEQ ID NO: 172
  source: /note="Description of Artificial Sequence: Synthetic polypeptide"

SEQ ID NO: 176 - protein, 121 aa, Artificial Sequence; identical to SEQ ID NO: 172
  source: /note="Description of Artificial Sequence: Synthetic polypeptide"

SEQ ID NO: 177 - protein, 121 aa, Artificial Sequence
  source: /note="Description of Artificial Sequence: Synthetic polypeptide"
QVQLVESGGGVVQPGRSLRLSCAASGFTFSYFGMHWVRQAPGKGLEWVAVIWYDASNKYYADAVKGRFTISRDNSKNTLYLQMNSLRAEDTAVYYCARDRTIFGVLLGDYWGQGTLVTVSS

SEQ ID NO: 178 - protein, 121 aa, Artificial Sequence
  source: /note="Description of Artificial Sequence: Synthetic polypeptide"
QVQLVESGGGVVQPGRSLRLSCAASGFTFSNFGMHWVRQAPGKGLEWVAVIWYDASNENYADAVKGRFTISRDNSKNTLYLQMNSLRVADTAVYYCARDGTIFGVVLGDYWGQGTLVTVSS

SEQ ID NO: 179 - protein, 121 aa, Artificial Sequence; identical to SEQ ID NO: 178
  source: /note="Description of Artificial Sequence: Synthetic polypeptide"

SEQ ID NO: 180 - protein, 121 aa, Artificial Sequence; identical to SEQ ID NO: 178
  source: /note="Description of Artificial Sequence: Synthetic polypeptide"

SEQ ID NO: 181 - protein, 121 aa, Artificial Sequence
  source: /note="Description of Artificial Sequence: Synthetic polypeptide"
QVQLVESGGGVVQPGRSLRLSCAASGFTFSNFGMHWVRQAPGKGLEWVAVIWYDASNENYADSVKGRFTISRDNSKNTLYLHMNSLRVADTAVYYCARDGTIFGVVLGDYWGQGTLVTVSS

SEQ ID NO: 182 - protein, 121 aa, Artificial Sequence
  source: /note="Description of Artificial Sequence: Synthetic polypeptide"
QVQLVESGGGVVQPGRSLRLSCAASGFTFSNFGMHWVRQAPGKGLEWVAVIWYDGSNENYADAVKGRFTISRDNSKNTLYLHMNSLRVADTAVYYCARDGTIFGVVLGDYWGQGTLVTVSS

SEQ ID NO: 183 - protein, 121 aa, Artificial Sequence
  source: /note="Description of Artificial Sequence: Synthetic polypeptide"
QVQLVESGGGVVQPGRSLRLSCAASGFTFSNFGMHWVRQAPGKGLEWVAVIWYDASNENYADAVKGRFTISRDNSKNTLYLQMNSLRVEDTAVYYCARDRTIFGVVLGDYWGQGTLVTVSS

SEQ ID NO: 184 - protein, 121 aa, Artificial Sequence
  source: /note="Description of Artificial Sequence: Synthetic polypeptide"
QVQLVESGGGVVQPGRSLRLSCAASGFTFSNFGMHWVRQAPGKGLEWVAVIWYDASNENYADAVKGRFTISRDNSKNTLYLQMNSLRVEDTAVYYCARDGTIFGVVLGDYWGQGTLVTVSS

SEQ ID NO: 185 - protein, 121 aa, Artificial Sequence
  source: /note="Description of Artificial Sequence: Synthetic polypeptide"
QVQLVESGGGVVQPGRSLRLSCAASGFTFSNFGMHWVRQAPGKGLEWVAVIWYDGSNENYADSVKGRFTISRDNSKNTLYLHMNSLRAADTAVYYCARDGTIFGVVLGDYWGQGTLVTVSS

SEQ ID NO: 186 - protein, 121 aa, Artificial Sequence
  source: /note="Description of Artificial Sequence: Synthetic polypeptide"
QVQLVESGGGVVQPGRSLRLSCAASGFTFSNFGMHWVRQAPGKGLEWVAVIWYDASNENYADAVKGRFTISRDNSKNTLYLQMNSLRAADTAVYYCARDGTIFGVVLGDYWGQGTLVTVSS

SEQ ID NO: 187 - protein, 121 aa, Artificial Sequence
  source: /note="Description of Artificial Sequence: Synthetic polypeptide"
QVQLVESGGGVVQPGRSLRLSCAASGFTFSNFGMHWVRQAPGKGLEWVAVIWYDASNENYADAVKGRFTISRDNSKNTLYLHMNSLRAADTAVYYCARDGTIFGVVLGDYWGQGTLVTVSS

SEQ ID NO: 188 - protein, 121 aa, Artificial Sequence; identical to SEQ ID NO: 186
  source: /note="Description of Artificial Sequence: Synthetic polypeptide"

SEQ ID NO: 189 - protein, 121 aa, Artificial Sequence; identical to SEQ ID NO: 186
  source: /note="Description of Artificial Sequence: Synthetic polypeptide"

SEQ ID NO: 190 - protein, 121 aa, Artificial Sequence; identical to SEQ ID NO: 187
  source: /note="Description of Artificial Sequence: Synthetic polypeptide"

SEQ ID NO: 191 - protein, 121 aa, Artificial Sequence; identical to SEQ ID NO: 187
  source: /note="Description of Artificial Sequence: Synthetic polypeptide"

SEQ ID NO: 192 - protein, 121 aa, Artificial Sequence; identical to SEQ ID NO: 186
  source: /note="Description of Artificial Sequence: Synthetic polypeptide"

SEQ ID NO: 193 - protein, 121 aa, Artificial Sequence
  source: /note="Description of Artificial Sequence: Synthetic polypeptide"
QVQLVESGGGVVQPGRSLRLSCAASGFTFSNFGMHWVRQAPGKGLEWVAVIWYDGSNENYADAVKGRFTISRDNSKNTLYLQMNSLRAADTAVYYCARDGTIFGVVLGDYWGQGTLVTVSS

SEQ ID NO: 194 - protein, 121 aa, Artificial Sequence
  source: /note="Description of Artificial Sequence: Synthetic polypeptide"
QVQLVESGGGVVQPGRSLRLSCAASGFTFSNFGMHWVRQAPGKGLEWVAVIWYDASNENYADSVKGRFTISRDNSKNTLYLQMNSLRAADTAVYYCARDGTIFGVVLGDYWGQGTLVTVSS

SEQ ID NO: 195 - protein, 121 aa, Artificial Sequence
  source: /note="Description of Artificial Sequence: Synthetic polypeptide"
QVQLVESGGGVVQPGRSLRLSCAASGFTFSNFGMHWVRQAPGKGLEWVAVIWYDASNENYADAVKGRFTISRDNSKNTLYLQMNSLRAEDTAVYYCARDRTIFGVVLGDYWGQGTLVTVSS

SEQ ID NO: 196 - protein, 121 aa, Artificial Sequence
  source: /note="Description of Artificial Sequence: Synthetic polypeptide"
QVQLVESGGGVVQPGRSLRLSCAASGFTFSNFGMHWVRQAPGKGLEWVAVIWYDASNENYADAVKGRFTISRDNSKNTLYLQMNSLRAEDTAVYYCARDGTIFGVVLGDYWGQGTLVTVSS

SEQ ID NO: 197 - protein, 120 aa, Artificial Sequence
  source: /note="Description of Artificial Sequence: Synthetic polypeptide"
QVQLVESGGGVVQPGRSLRLSCAASGFTFSSYGMHWVRQAPGKGLEWVAVIWYDASNKYYADAVKGRFTISRDNSKNTLYLQMNSLRAEDTAVYYCARDRTIFGVVLDYWGQGTLVTVSS

SEQ ID NO: 198 - protein, 120 aa, Artificial Sequence
  source: /note="Description of Artificial Sequence: Synthetic polypeptide"
QVQLVESGGGVVQPGRSLRLSCAASGFTFSSYGMHWVRQAPGKGLEWVAVIWYDASNKYYADAVKGRFTISSDNSKNTLYLQMNSLRAEDTAVYYCARDRTIFGVVLDYWGQGTLVTVSS

SEQ ID NO: 199 - protein, 120 aa, Artificial Sequence; identical to SEQ ID NO: 197
  source: /note="Description of Artificial Sequence: Synthetic polypeptide"

SEQ ID NO: 200 - protein, 120 aa, Artificial Sequence; identical to SEQ ID NO: 197
  source: /note="Description of Artificial Sequence: Synthetic polypeptide"

SEQ ID NO: 201 - protein, 120 aa, Artificial Sequence; identical to SEQ ID NO: 198
  source: /note="Description of Artificial Sequence: Synthetic polypeptide"

SEQ ID NO: 202 - protein, 120 aa, Artificial Sequence; identical to SEQ ID NO: 198
  source: /note="Description of Artificial Sequence: Synthetic polypeptide"

SEQ ID NO: 203 - protein, 120 aa, Artificial Sequence; identical to SEQ ID NO: 197
  source: /note="Description of Artificial Sequence: Synthetic polypeptide"

SEQ ID NO: 204 - protein, 120 aa, Artificial Sequence
  source: /note="Description of Artificial Sequence: Synthetic polypeptide"
QVQLVESGGGVVQPGRSLRLSCAASGFTFSSYGMHWVRQAPGKGLEWVAVIWYDASNKYYADSVKGRFTISRDNSKNTLYLQMNSLRAEDTAVYYCARDRTIFGVVLDYWGQGTLVTVSS

SEQ ID NO: 205 - protein, 120 aa, Artificial Sequence
  source: /note="Description of Artificial Sequence: Synthetic polypeptide"
QVQLVESGGGVVQPGRSLRLSCAASGFTFSSYGMHWVRQAPGKGLEWVAVIWYDGSNKYYADAVKGRFTISRDNSKNTLYLQMNSLRAEDTAVYYCARDRTIFGVVLDYWGQGTLVTVSS

SEQ ID NO: 206 - protein, 121 aa, Artificial Sequence; identical to SEQ ID NO: 172
  source: /note="Description of Artificial Sequence: Synthetic polypeptide"

SEQ ID NO: 207 - protein, 121 aa, Artificial Sequence; identical to SEQ ID NO: 177
  source: /note="Description of Artificial Sequence: Synthetic polypeptide"

SEQ ID NO: 208 - protein, 121 aa, Artificial Sequence; identical to SEQ ID NO: 172
  source: /note="Description of Artificial Sequence: Synthetic polypeptide"

SEQ ID NO: 209 - protein, 121 aa, Artificial Sequence; identical to SEQ ID NO: 177
  source: /note="Description of Artificial Sequence: Synthetic polypeptide"

SEQ ID NO: 210 - protein, 121 aa, Artificial Sequence; identical to SEQ ID NO: 160
  source: /note="Description of Artificial Sequence: Synthetic polypeptide"

SEQ ID NO: 211 - protein, 121 aa, Artificial Sequence; identical to SEQ ID NO: 173
  source: /note="Description of Artificial Sequence: Synthetic polypeptide"

SEQ ID NO: 212 - protein, 121 aa, Artificial Sequence; identical to SEQ ID NO: 174
  source: /note="Description of Artificial Sequence: Synthetic polypeptide"

SEQ ID NO: 213 - protein, 120 aa, Artificial Sequence
  source: /note="Description of Artificial Sequence: Synthetic polypeptide"
QVQLVESGGGVVQPGRSLRLSCAASGFSFSSYGMHWVRQPPGKGLEWVAAIWYDANNKYYADAVKGRFTISRDSSKNTLYLQMNSLRAEDTAVYYCARDRTIFGVVLEYWGQGTLVTVSS

SEQ ID NO: 214 - protein, 120 aa, Artificial Sequence; identical to SEQ ID NO: 213
  source: /note="Description of Artificial Sequence: Synthetic polypeptide"

SEQ ID NO: 215 - protein, 120 aa, Artificial Sequence
  source: /note="Description of Artificial Sequence: Synthetic polypeptide"
QVQLVESGGGVVQPGRSLRLSCAASGFSFSSYGMHWVRQPPGKGLEWVAAIWYDANNKYYADAVKGRFTISRDSSKNTLYLQMNSLRAEDTAVYYCARDRTIFGVVLEYLGQGTLVTVSS

SEQ ID NO: 216 - protein, 120 aa, Artificial Sequence; identical to SEQ ID NO: 213
  source: /note="Description of Artificial Sequence: Synthetic polypeptide"

SEQ ID NO: 217 - protein, 120 aa, Artificial Sequence; identical to SEQ ID NO: 215
  source: /note="Description of Artificial Sequence: Synthetic polypeptide"

SEQ ID NO: 218 - protein, 120 aa, Artificial Sequence; identical to SEQ ID NO: 215
  source: /note="Description of Artificial Sequence: Synthetic polypeptide"

SEQ ID NO: 219 - protein, 120 aa, Artificial Sequence; identical to SEQ ID NO: 213
  source: /note="Description of Artificial Sequence: Synthetic polypeptide"

SEQ ID NO: 220 - protein, 120 aa, Artificial Sequence
  source: /note="Description of Artificial Sequence: Synthetic polypeptide"
QVQLVESGGGVVQPGRSLRLSCAASGFSFSSYGMHWVRQPPGKGLEWVAAIWYDGNNKYYADAVKGRFTISRDSSKNTLYLQMNSLRAEDTAVYYCARDRTIFGVVLEYWGQGTLVTVSS

SEQ ID NO: 221 - protein, 120 aa, Artificial Sequence
  source: /note="Description of Artificial Sequence: Synthetic polypeptide"
QVQLVESGGGVVQPGRSLRLSCAASGFSFSSYGMHWVRQPPGKGLEWVAAIWYDANNKYYADSVKGRFTISRDSSKNTLYLQMNSLRAEDTAVYYCARDRTIFGVVLEYWGQGTLVTVSS

SEQ ID NO: 222 - protein, 120 aa, Artificial Sequence; identical to SEQ ID NO: 213
  source: /note="Description of Artificial Sequence: Synthetic polypeptide"

SEQ ID NO: 223 - protein, 120 aa, Artificial Sequence; identical to SEQ ID NO: 215
  source: /note="Description of Artificial Sequence: Synthetic polypeptide"

SEQ ID NO: 224 - protein, 120 aa, Artificial Sequence
  source: /note="Description of Artificial Sequence: Synthetic polypeptide"
QVQLVESGGGVVQPGRSLRLSCAASGFSFSSYGMHWVRQAPGKGLEWVAVIWYDASNKYYEDAVKGRFTISRDNSKNTLFLQVNSLRAEDTAVYYCARGITIFGHGFEYWGQGTLVTVSS

SEQ ID NO: 225 - protein, 120 aa, Artificial Sequence
  source: /note="Description of Artificial Sequence: Synthetic polypeptide"
QVQLVESGGGVVQPGRSLRLSCAASGFSFSSYGMHWVRQAPGKGLEWVAVIWYDGSNKYYEDSVKGRFTISRDNSKNTLFLQVNSLRAEDTAVYYCARGITIFGHGFEYWGQGTLVTVSS

SEQ ID NO: 226 - protein, 120 aa, Artificial Sequence
  source: /note="Description of Artificial Sequence: Synthetic polypeptide"
QVQLVESGGGVVQPGRSLRLSCAASGFSFSSYGMHWVRQAPGKGLEWVAVIWYDGSNKYYEDAVKGRFTISRDNSKNTLFLQVNSLRAEDTAVYYCARGITIFGHGFEYWGQGTLVTVSS

SEQ ID NO: 227 - protein, 120 aa, Artificial Sequence
  source: /note="Description of Artificial Sequence: Synthetic polypeptide"
QVQLVESGGGVVQPGRSLRLSCAASGFSFSSYGMHWVRQAPGKGLEWVAVIWYDASNKYYEDSVKGRFTISRDNSKNTLFLQVNSLRAEDTAVYYCARGITIFGHGFEYWGQGTLVTVSS

SEQ ID NO: 228 - protein, 120 aa, Artificial Sequence
  source: /note="Description of Artificial Sequence: Synthetic polypeptide"
QVQLVESGGGVVQPGRSLRLSCAASGFTFSNYGMHWVRQAPGEGLEWVAAIWFDASDKYYADAVKGRFTISRDNSKNTLYLQMNSLRAEDTAVYYCARDQAIFGVVPDYWGQGTLVTVSS

SEQ ID NO: 229 - protein, 120 aa, Artificial Sequence
  source: /note="Description of Artificial Sequence: Synthetic polypeptide"
QVQLVESGGGVVQPGRSLRLSCAASGFTFSNYGMHWVRQAPGEGLEWVAAIWFDASDKYYADSVKGRFTISRDNSKNTLYLQMNSLRAEDTAVYYCARDQAIFGVVPDYWGQGTLVTVSS

SEQ ID NO: 230 - protein, 120 aa, Artificial Sequence
  source: /note="Description of Artificial Sequence: Synthetic polypeptide"
QVQLVESGGGVVQPGRSLRLSCAASGFTFSNYGMHWVRQAPGEGLEWVAAIWFDGSDKYYADAVKGRFTISRDNSKNTLYLQMNSLRAEDTAVYYCARDQAIFGVVPDYWGQGTLVTVSS

SEQ ID NO: 231 - protein, 120 aa, Artificial Sequence; identical to SEQ ID NO: 228
  source: /note="Description of Artificial Sequence: Synthetic polypeptide"

SEQ ID NO: 232 - protein, 120 aa, Artificial Sequence
  source: /note="Description of Artificial Sequence: Synthetic polypeptide"
QVQLVESGGGVVQPGRSLRLSCAASGFTFSNYGMHWVRQAPGKGLEWVAAIWFDASDKYYADAVKGRFTISRDNSKNTLYLQMNSLRAEDTAVYYCARDQAIFGVVPDYWGQGTLVTVSS

SEQ ID NO: 233 - protein, 120 aa, Artificial Sequence; identical to SEQ ID NO: 232
  source: /note="Description of Artificial Sequence: Synthetic polypeptide"

SEQ ID NO: 234 - protein, 120 aa, Artificial Sequence; identical to SEQ ID NO: 228
  source: /note="Description of Artificial Sequence: Synthetic polypeptide"

SEQ ID NO: 235 - protein, 120 aa, Artificial Sequence; identical to SEQ ID NO: 232
  source: /note="Description of Artificial Sequence: Synthetic polypeptide"

SEQ ID NO: 236 - protein, 126 aa, Artificial Sequence
  source: /note="Description of Artificial Sequence: Synthetic polypeptide"
QVQLQESGPGLVKPSETLSLTCTVSGDSISSGGYYWSWIRQPPGKGLEWIGYIYYSGSTYYNPSLKSRVTISVDTSKNQFSLKLSSVTAADTAVYYCARDRITIFGVVMGGGMDVWGQGTTVTVSS

SEQ ID NO: 237 - protein, 126 aa, Artificial Sequence; identical to SEQ ID NO: 236
  source: /note="Description of Artificial Sequence: Synthetic polypeptide"

SEQ ID NO: 238 - protein, 126 aa, Artificial Sequence
  source: /note="Description of Artificial Sequence: Synthetic polypeptide"
QVQLQESGPGLVKPSQTLSLTCTVSGDSISSGGYYWSWIRQPPGKGLEWIGYIYYSGSTYYNPSLKSRVTISVDTSKNQFSLKLSSVTAADTAVYYCARDRITIFGVVMGGGMDVWGQGTTVTVSS

SEQ ID NO: 239 - protein, 126 aa, Artificial Sequence
  source: /note="Description of Artificial Sequence: Synthetic polypeptide"
QVQLQESGPGLVKPSETLSLTCTVSGDSISSGGYYWSWIRQHPGKGLEWIGYIYYSGSTYYNPSLKSRVTISVDTSKNQFSLKLSSVTAADTAVYYCARDRITIFGVVMGGGMDVWGQGTTVTVSS

SEQ ID NO: 240 - protein, 126 aa, Artificial Sequence; identical to SEQ ID NO: 166
  source: /note="Description of Artificial Sequence: Synthetic polypeptide"

SEQ ID NO: 241 - protein, 126 aa, Artificial Sequence; identical to SEQ ID NO: 239
  source: /note="Description of Artificial Sequence: Synthetic polypeptide"

SEQ ID NO: 242 - protein, 126 aa, Artificial Sequence; identical to SEQ ID NO: 238
  source: /note="Description of Artificial Sequence: Synthetic polypeptide"

SEQ ID NO: 243 - protein, 123 aa, Artificial Sequence
  source: /note="Description of Artificial Sequence: Synthetic polypeptide"
QVQLVQSGAEVKKPGASVKVSCKASGYTFTGYYIHWVRQAPGQGLEWMGWINPESGGTDYSQRFQGRVTMTRDTSISTAYMELNRLRSDDTAVYYCAREATIFGMVIVPFDYWGQGTLVTVSS

SEQ ID NO: 244 - protein, 123 aa, Artificial Sequence
  source: /note="Description of Artificial Sequence: Synthetic polypeptide"
QVPLVQSGAEVKKPGASVKVSCKASGYTFTGYYIHWVRQAPGQGLEWMGWINPESGGTDYSQRFQGRFTMTRDTSISTAYMELNRLRSDDTAVYYCAREATIFGMVIVPFDYWGQGTLVTVSS

SEQ ID NO: 245 - protein, 123 aa, Artificial Sequence
  source: /note="Description of Artificial Sequence: Synthetic polypeptide"
QVQLVQSGAEVKKPGASVKVSCKASGYTFTGYYIHWVRQAPGQGLEWMGWINPDAGGTDYSQRFQGRVTMTRDTSISTAYMELNRLRSDDTAVYYCAREATIFGMVIVPFDYWGQGTLVTVSS

SEQ ID NO: 246 - protein, 123 aa, Artificial Sequence
  source: /note="Description of Artificial Sequence: Synthetic polypeptide"
QVPLVQSGAEVKKPGASVKVSCKASGYTFTGYYIHWVRQAPGQGLEWMGWINPDAGGTDYSQRFQGRFTMTRDTSISTAYMELNRLRSDDTAVYYCAREATIFGMVIVPFDYWGQGTLVTVSS

SEQ ID NO: 247 - protein, 123 aa, Artificial Sequence
  source: /note="Description of Artificial Sequence: Synthetic polypeptide"
QVQLVQSGAEVKKPGASVKVSCKASGYTFTGYYIHWVRQAPGQGLEWMGWINPDSGGTDYSQRFQGRVTMTRDTSISTAYMELNRLRSDDTAVYYCAREATIFGMVIVPFDYWGQGTLVTVSS

SEQ ID NO: 248 - protein, 123 aa, Artificial Sequence
  source: /note="Description of Artificial Sequence: Synthetic polypeptide"
QVQLVQSGAEVKKPGASVKVSCKASGYTFTGYYIHWVRQAPGQGLEWMGWINPDSGGTDYSQRFQGRFTMTRDTSISTAYMELNRLRSDDTAVYYCAREATIFGMVIVPFDYWGQGTLVTVSS

SEQ ID NO: 249 - protein, 123 aa, Artificial Sequence
  source: /note="Description of Artificial Sequence: Synthetic polypeptide"
QVPLVQSGAEVKKPGASVKVSCKASGYTFTGYYIHWVRQAPGQGLEWMGWINPDSGGTDYSQRFQGRVTMTRDTSISTAYMELNRLRSDDTAVYYCAREATIFGMVIVPFDYWGQGTLVTVSS

SEQ ID NO: 250 - protein, 123 aa, Artificial Sequence
  source: /note="Description of Artificial Sequence: Synthetic polypeptide"
QVQLVQSGAEVKKPGASVKVSCKASGYTFTGYYIHWVRQAPGQGLEWMGWINPDAGGTDYSQRFQGRFTMTRDTSISTAYMELNRLRSDDTAVYYCAREATIFGMVIVPFDYWGQGTLVTVSS

SEQ ID NO: 251 - protein, 123 aa, Artificial Sequence
  source: /note="Description of Artificial Sequence: Synthetic polypeptide"
QVPLVQSGAEVKKPGASVKVSCKASGYTFTGYYIHWVRQAPGQGLEWMGWINPDAGGTDYSQRFQGRVTMTRDTSISTAYMELNRLRSDDTAVYYCAREATIFGMVIVPFDYWGQGTLVTVSS

SEQ ID NO: 252 - protein, 123 aa, Artificial Sequence
  source: /note="Description of Artificial Sequence: Synthetic polypeptide"
QVQLVQSGAEVKKPGASVKVSCKASGYTFTGYYIHWVRQAPGQGLEWMGWINPDAGGTDYSQRFQGRVTMTRDTSISTAYMELNSLRSDDTAVYYCAREATIFGMVIVPFDYWGQGTLVTVSS

SEQ ID NO: 253 - protein, 123 aa, Artificial Sequence
  source: /note="Description of Artificial Sequence: Synthetic polypeptide"
QVQLVQSGAEVKKPGASVKVSCKASGYTFTGYYIHWVRQAPGQGLEWMGWINPESGGTDYSQRFQGRVTMTRDTSISTAYMELNSLRSDDTAVYYCAREATIFGMVIVPFDYWGQGTLVTVSS

SEQ ID NO: 254 - protein, 123 aa, Artificial Sequence
  source: /note="Description of Artificial Sequence: Synthetic polypeptide"
QVPLVQSGAEVKKPGASVKVSCKASGYTFTGYYIHWVRQAPGQGLVWMGWISPNSGETSYAQKFQDRVTMTRDTSISTAYMELSRLRSDDTAVYFCAREATIFGMLIVPFDYWGQGTLVTVSS

SEQ ID NO: 255 - protein, 123 aa, Artificial Sequence
  source: /note="Description of Artificial Sequence: Synthetic polypeptide"
QVPLVQSGAEVKKPGASVKVSCKASGYTFTGYYIHWVRQAPGQGLVWMGWISPNSGDTSYAQKFQDRVTMTRDTSISTAYMELSRLRSDDTAVYFCAREATIFGMLIVPFDYWGQGTLVTVSS

SEQ ID NO: 256 - protein, 123 aa, Artificial Sequence; identical to SEQ ID NO: 254
  source: /note="Description of Artificial Sequence: Synthetic polypeptide"

SEQ ID NO: 257 - protein, 123 aa, Artificial Sequence
  source: /note="Description of Artificial Sequence: Synthetic polypeptide"
QVPLVQSGAEVKKPGASVKVSCKASGYTFTGYYIHWVRQAPGQGLVWMGWISPNSGETSYAQKFQDRVTMTRDTSISTAYMELSRLRSDDTAVYFCTREATIFGMLIVPFDYWGQGTLVTVSS

SEQ ID NO: 258 - protein, 123 aa, Artificial Sequence; identical to SEQ ID NO: 164
  source: /note="Description of Artificial Sequence: Synthetic polypeptide"

SEQ ID NO: 259 - protein, 123 aa, Artificial Sequence; identical to SEQ ID NO: 257
  source: /note="Description of Artificial Sequence: Synthetic polypeptide"

SEQ ID NO: 260 - protein, 123 aa, Artificial Sequence; identical to SEQ ID NO: 255
  source: /note="Description of Artificial Sequence: Synthetic polypeptide"

SEQ ID NO: 261 - protein, 123 aa, Artificial Sequence
  source: /note="Description of Artificial Sequence: Synthetic polypeptide"
QVQLVQSGAEVKKPGASVKVSCKASGYTFTGYYIHWVRQAPGQGLEWMGWISPNSGETSYAQKFQDRVTMTRDTSISTAYMELSSLRSDDTAVYFCAREATIFGMLIVPFDYWGQGTLVTVSS

SEQ ID NO: 262 - protein, 123 aa, Artificial Sequence
  source: /note="Description of Artificial Sequence: Synthetic polypeptide"
QVQLVQSGAEVKKPGASVKVSCKASGYTFTGYYIHWVRQAPGQGLEWMGWISPNSGETSYAQKFQDRVTMTRDTSISTAYMELSRLRSDDTAVYFCAREATIFGMLIVPFDYWGQGTLVTVSS

SEQ ID NO: 263 - protein, 123 aa, Artificial Sequence
  source: /note="Description of Artificial Sequence: Synthetic polypeptide"
QVPLVQSGAEVKKPGASVKVSCKASGYTFTGYYIHWVRQAPGQGLEWMGWINPESGGTDYSQRFQGRVTMTRDTSISTAYMELSRLRSDDTAVYYCAREATIFGMVIVPFDYWGQGTLVTVSS

SEQ ID NO: 264 - protein, 123 aa, Artificial Sequence
  source: /note="Description of Artificial Sequence: Synthetic polypeptide"
QVPLVQSGAEVKKPGASVKVSCKASGYTFTGYYIHWVRQAPGQGLEWMGWINPESGGTDYSQRFQGRFTMTRDTSISTAYMELSRLRSDDTAVYYCAREATIFGMVIVPFDYWGQGTLVTVSS

SEQ ID NO: 265 - protein, 123 aa, Artificial Sequence
  source: /note="Description of Artificial Sequence: Synthetic polypeptide"
QVPLVQSGAEVKKPGASVKVSCKASGYTFTGYYIHWVRQAPGQGLEWMGWINPDSGGTDYSQRFQGRVTMTRDTSISTAYMELSRLRSDDTAVYYCAREATIFGMVIVPFDYWGQGTLVTVSS

SEQ ID NO: 266 - protein, 123 aa, Artificial Sequence
  source: /note="Description of Artificial Sequence: Synthetic polypeptide"
QVQLVQSGAEVKKPGASVKVSCKASGYTFTGYYIHWVRQAPGQGLEWMGWINPESGGTDYSQRFQGRVTMTRDTSISTAYMELSSLRSDDTAVYYCAREATIFGMVIVPFDYWGQGTLVTVSS

SEQ ID NO: 267 - protein, 123 aa, Artificial Sequence; identical to SEQ ID NO: 263
  source: /note="Description of Artificial Sequence: Synthetic polypeptide"

SEQ ID NO: 268 - protein, 123 aa, Artificial Sequence
  source: /note="Description of Artificial Sequence: Synthetic polypeptide"
QVPLVQSGAEVKKPGASVKVSCKASGYTFTGYYIHWVRQAPGQGLEWMGWISPNQGETNYAQKFQDRVTMTRDTSISTAYMELSRLRSDDTAVYYCAREATIFGMLIVPFDYWGQGTLVTVSS

SEQ ID NO: 269 - protein, 123 aa, Artificial Sequence
  source: /note="Description of Artificial Sequence: Synthetic polypeptide"
QVPLVQSGAEVKKPGASVKVSCKASGYTFTGYYIHWVRQAPGQGLEWMGWISPNQGDTNYAQKFQDRVTMTRDTSISTAYMELSRLRSDDTAVYYCAREATIFGMLIVPFDYWGQGTLVTVSS

SEQ ID NO: 270 - protein, 123 aa, Artificial Sequence
  source: /note="Description of Artificial Sequence: Synthetic polypeptide"
QVPLVQSGAEVKKPGASVKVSCKASGYTFTGYYIHWVRQAPGQGLEWMGWISPNQGETNYAQKFQDRVTMTRDTSISTAYMELSRLRSDDTAVYYCTREATIFGMLIVPFDYWGQGTLVTVSS

SEQ ID NO: 271 - protein, 123 aa, Artificial Sequence
  source: /note="Description of Artificial Sequence: Synthetic polypeptide"
QVPLVQSGAEVKKPGASVKVSCKASGYTFTGYYIHWVRQAPGQGLEWMGWISPNNGETNYAQKFQDRVTMTRDTSISTAYMELSRLRSDDTAVYYCAREATIFGMLIVPFDYWGQGTLVTVSS

SEQ ID NO: 272 - protein, 123 aa, Artificial Sequence
  source: /note="Description of Artificial Sequence: Synthetic polypeptide"
QVPLVQSGAEVKKPGASVKVSCKASGYTFTGYYIHWVRQAPGQGLEWMGWISPNNGDTNYAQKFQDRVTMTRDTSISTAYMELSRLRSDDTAVYYCAREATIFGMLIVPFDYWGQGTLVTVSS

SEQ ID NO: 273 - protein, 123 aa, Artificial Sequence
  source: /note="Description of Artificial Sequence: Synthetic polypeptide"
QVPLVQSGAEVKKPGASVKVSCKASGYTFTGYYIHWVRQAPGQGLEWMGWISPNQGDTNYAQKFQDRVTMTRDTSISTAYMELSRLRSDDTAVYYCTREATIFGMLIVPFDYWGQGTLVTVSS

SEQ ID NO: 274 - protein, 123 aa, Artificial Sequence
  source: /note="Description of Artificial Sequence: Synthetic polypeptide"
QVPLVQSGAEVKKPGASVKVSCKASGYTFTGYYIHWVRQAPGQGLEWMGWISPNNGETNYAQKFQDRVTMTRDTSISTAYMELSRLRSDDTAVYYCTREATIFGMLIVPFDYWGQGTLVTVSS

SEQ ID NO: 275 - protein, 123 aa, Artificial Sequence; identical to SEQ ID NO: 268
  source: /note="Description of Artificial Sequence: Synthetic polypeptide"

SEQ ID NO: 276 - protein, 123 aa, Artificial Sequence; identical to SEQ ID NO: 272
  source: /note="Description of Artificial Sequence: Synthetic polypeptide"

SEQ ID NO: 277 - protein, 123 aa, Artificial Sequence; identical to SEQ ID NO: 269
  source: /note="Description of Artificial Sequence: Synthetic polypeptide"

SEQ ID NO: 278 - protein, 123 aa, Artificial Sequence; identical to SEQ ID NO: 271
  source: /note="Description of Artificial Sequence: Synthetic polypeptide"

SEQ ID NO: 279 - protein, 123 aa, Artificial Sequence
  source: /note="Description of Artificial Sequence: Synthetic polypeptide"
QVQLVQSGAEVKKPGASVKVSCKASGYTFTGYYIHWVRQAPGQGLEWMGWISPNQGETNYAQKFQDRVTMTRDTSISTAYMELSSLRSDDTAVYYCAREATIFGMLIVPFDYWGQGTLVTVSS

SEQ ID NO: 280 - protein, 123 aa, Artificial Sequence; identical to SEQ ID NO: 279
  source: /note="Description of Artificial Sequence: Synthetic polypeptide"

SEQ ID NO: 281 - protein, 128 aa, Artificial Sequence; identical to SEQ ID NO: 158
  source: /note="Description of Artificial Sequence: Synthetic polypeptide"

SEQ ID NO: 282 - protein, 128 aa, Artificial Sequence; identical to SEQ ID NO: 158
  source: /note="Description of Artificial Sequence: Synthetic polypeptide"

SEQ ID NO: 283 - protein, 128 aa, Artificial Sequence; identical to SEQ ID NO: 158
  source: /note="Description of Artificial Sequence: Synthetic polypeptide"

SEQ ID NO: 284 - protein, 128 aa, Artificial Sequence; identical to SEQ ID NO: 158
  source: /note="Description of Artificial Sequence: Synthetic polypeptide"

SEQ ID NO: 285 - protein, 128 aa, Artificial Sequence; identical to SEQ ID NO: 158
  source: /note="Description of Artificial Sequence: Synthetic polypeptide"

SEQ ID NO: 286 - protein, 128 aa, Artificial Sequence; identical to SEQ ID NO: 158
  source: /note="Description of Artificial Sequence: Synthetic polypeptide"

SEQ ID NO: 287 - protein, 128 aa, Artificial Sequence; identical to SEQ ID NO: 158
  source: /note="Description of Artificial Sequence: Synthetic polypeptide"

SEQ ID NO: 288 - protein, 128 aa, Artificial Sequence; identical to SEQ ID NO: 158
  source: /note="Description of Artificial Sequence: Synthetic polypeptide"

SEQ ID NO: 289 - protein, 128 aa, Artificial Sequence; identical to SEQ ID NO: 158
  source: /note="Description of Artificial Sequence: Synthetic polypeptide"

SEQ ID NO: 290 - protein, 128 aa, Artificial Sequence; identical to SEQ ID NO: 158
  source: /note="Description of Artificial Sequence: Synthetic polypeptide"

SEQ ID NO: 291 - protein, 128 aa, Artificial Sequence; identical to SEQ ID NO: 158
  source: /note="Description of Artificial Sequence: Synthetic polypeptide"

SEQ ID NO: 292 - protein, 128 aa, Artificial Sequence; identical to SEQ ID NO: 158
  source: /note="Description of Artificial Sequence: Synthetic polypeptide"

SEQ ID NO: 293 - protein, 128 aa, Artificial Sequence
  source: /note="Description of Artificial Sequence: Synthetic polypeptide"
QMQVVQSGAEVKKPGASVKVSCKASGYTFTGYYMHWVRQAPGQGLEWMGWINPNSGGTNYAQKFQGRVTMTRDTSISTAYMELSSLRSDDTAVYYCARGGDYVFGTYRPHYYYGMDVWGQGTTVTVSS

SEQ ID NO: 294 - protein, 128 aa, Artificial Sequence
  source: /note="Description of Artificial Sequence: Synthetic polypeptide"
QMQVVQSGAEVKKPGASVKVSCKASGYTFTGYYMHWVRQAPGQGLEWMGWINPNSGGTNYAQKFQGRVTMTRDTSISTAYMELSRLRSDDTAVYYCARGGDYVFGTYRPHYYYGMDVWGQGTTVTVSS

SEQ ID NO: 295 - protein, 121 aa, Artificial Sequence; identical to SEQ ID NO: 195
  source: /note="Description of Artificial Sequence: Synthetic polypeptide"

SEQ ID NO: 296 - protein, 121 aa, Artificial Sequence; identical to SEQ ID NO: 177
  source: /note="Description of Artificial Sequence: Synthetic polypeptide"

SEQ ID NO: 297 - protein, 128 aa, Artificial Sequence; identical to SEQ ID NO: 158
  source: /note="Description of Artificial Sequence: Synthetic polypeptide"

SEQ ID NO: 298 - protein, 121 aa, Artificial Sequence
  source: /note="Description of Artificial Sequence: Synthetic polypeptide"
QVQLVESGGGVVQPGRSLRLSCTASGFTFSSYGIHWVRQAPGKGLEWVAVIWYDGSNKFHADSVKGRFTISRDNSKNTLYLQMNSLRAEDSAMYFCARGKVAGMPEAFEIWGQGTKVTVSS

SEQ ID NO: 299 - protein, 129 aa, Artificial Sequence
  source: /note="Description of Artificial Sequence: Synthetic polypeptide"
QMQLVQSGAEVKKPGASVKVSCKASGYTFTSYDINWVRQATGQGLEWMGWMNPNSGNTGYAQKFQGRVTMTRDTSISTAYMELSSLRSQDTAVYYCARGGDYVWGSYRPYYYYYGMDVWGQGTTVTVSS

SEQ ID NO: 300 - protein, 121 aa, Artificial Sequence
  source: /note="Description of Artificial Sequence: Synthetic polypeptide"
QVQLVESGGGVVQPGRSLRLSCAASGFTFSSYGIHWVRQAPGKGLEWVAVIWYDASNKFHADAVKGRFTISRDNSKNTLYLQMNSLRAEDSAMYFCARGKVAGMPEAFEIWGQGTKVTVSS

SEQ ID NO: 301 - protein, 121 aa, Artificial Sequence
  source: /note="Description of Artificial Sequence: Synthetic polypeptide"
QVQLVESGGGVVQPGRSLRLSCTASGFTFSSYGIHWVRQAPGKGLEWVAVIWYDASNKFHADAVKGRFTISRDNSKNTLYLQMNSLRAEDSAMYFCARGKVAGMPEAFEIWGQGTKVTVSS

SEQ ID NO: 302 - protein, 121 aa, Artificial Sequence; identical to SEQ ID NO: 300
  source: /note="Description of Artificial Sequence: Synthetic polypeptide"

SEQ ID NO: 303 - protein, 121 aa, Artificial Sequence
  source: /note="Description of Artificial Sequence: Synthetic polypeptide"
QVQLVESGGGVVQPGRSLRLSCAASGFTFSSYGIHWVRQAPGKGLEWVAVIWYDASNKFHADAVKGRFTISRDNSKNTLYLQMNSLRAEDSAMYFCARGKVAGMPEAFEIWGQGTLVTVSS

SEQ ID NO: 304 - protein, 121 aa, Artificial Sequence
  source: /note="Description of Artificial Sequence: Synthetic polypeptide"
QVQLVESGGGVVQPGRSLRLSCAASGFTFSSYGIHWVRQAPGKGLEWVAVIWYDASNKFHADSVKGRFTISRDNSKNTLYLQMNSLRAEDSAMYFCARGKVAGMPEAFEIWGQGTKVTVSS

SEQ ID NO: 305 - protein, 121 aa, Artificial Sequence
  source: /note="Description of Artificial Sequence: Synthetic polypeptide"
QVQLVESGGGVVQPGRSLRLSCAASGFTFSSYGIHWVRQAPGKGLEWVAVIWYDGSNKFHADAVKGRFTISRDNSKNTLYLQMNSLRAEDSAMYFCARGKVAGMPEAFEIWGQGTKVTVSS

SEQ ID NO: 306 - protein, 129 aa, Artificial Sequence
  source: /note="Description of Artificial Sequence: Synthetic polypeptide"
QMQLVQSGAEVKKPGASVKVSCKASGYTFTSYDINWVRQATGQGLEWMGWMNPNSGGTGYAQKFQGRVTMTRDTSISTAYMELSSLRSQDTAVYYCARGGDYVWGSYRPYYYYYGMDVWGQGTTVTVSS

SEQ ID NO: 307 - protein, 129 aa, Artificial Sequence; identical to SEQ ID NO: 299
  source: /note="Description of Artificial Sequence: Synthetic polypeptide"

SEQ ID NO: 308 - protein, 129 aa, Artificial Sequence; identical to SEQ ID NO: 306
  source: /note="Description of Artificial Sequence: Synthetic polypeptide"

SEQ ID NO: 309 - protein, 129 aa, Artificial Sequence
  source: /note="Description of Artificial Sequence: Synthetic polypeptide"
QMQLVQSGAEVKKPGASVKVSCKASGYTFTSYDINWVRQAPGQGLEWMGWMNPNSGGTGYAQKFQGRVTMTRDTSISTAYMELSSLRSDDTAVYYCARGGDYVWGSYRPYYYYYGMDVWGQGTTVTVSS

SEQ ID NO: 310 - protein, 129 aa, Artificial Sequence; identical to SEQ ID NO: 306
  source: /note="Description of Artificial Sequence: Synthetic polypeptide"

SEQ ID NO: 311 - protein, 129 aa, Artificial Sequence
  source: /note="Description of Artificial Sequence: Synthetic polypeptide"
QMQLVQSGAEVKKPGASVKVSCKASGYTFTSYDINWVRQAPGQGLEWMGWMNPNSGNTGYAQKFQGRVTMTRDTSISTAYMELSSLRSDDTAVYYCARGGDYVWGSYRPYYYYYGMDVWGQGTTVTVSS

SEQ ID NO: 312 - protein, 129 aa, Artificial Sequence
  source: /note="Description of Artificial Sequence: Synthetic polypeptide"
QMQLVQSGAEVKKPGASVKVSCKASGYTFTSYDINWVRQATGQGLEWMGWMNPNSGGTGYAQKFQGRVTMTRDTSISTAYMELSSLRSQDTAVYYCARGGDYVFGSYRPYYYYYGMDVWGQGTTVTVSS

SEQ ID NO: 313 - protein, 129 aa, Artificial Sequence
  source: /note="Description of Artificial Sequence: Synthetic polypeptide"
QMQLVQSGAEVKKPGASVKVSCKASGYTFTSYDINWVRQAPGQGLEWMGWMNPNSGGTGYAQKFQGRVTMTRDTSISTAYMELSSLRSDDTAVYYCARGGDYVFGSYRPYYYYYGMDVWGQGTTVTVSS

SEQ ID NO: 314 - protein, 121 aa, Artificial Sequence; identical to SEQ ID NO: 303
  source: /note="Description of Artificial Sequence: Synthetic polypeptide"

SEQ ID NO: 315 - protein, 216 aa, Artificial Sequence
  source: /note="Description of Artificial Sequence: Synthetic polypeptide"
QSVLTQPPSASGTPGQRVTISCSGSSSNIGSNTVNWYQHLPGTAPKLLIYTNNQRPSGVPDRFSGSKSGTSASLAISGLQSEDEADYFCATFDDSLNGPVFGGGTKLTVLGQPKAAPSVTLFPPSSEELQANKATLVCLISDFYPGAVTVAWKADSSPVKAGVETTTPSKQSNNKYAASSYLSLTPEQWKSHRSYSCQVTHEGSTVEKTVAPTECS

SEQ ID NO: 316 - protein, 214 aa, Artificial Sequence
  source: /note="Description of Artificial Sequence: Synthetic polypeptide"
DIQMTQSPSSLSASIGDRVTITCRASQDIRDYLGWYQQKPGKAPKRLIYGASSLQSGVPSRFSGSGSGTEFTLTISSLQPEDFATYYCLQHNNYPFTFGPGTKVDIKRTVAAPSVFIFPPSDEQLKSGTASVVCLLNNFYPREAKVQWKVDNALQSGNSQESVTEQDSKDSTYSLSSTLTLSKADYEKHKVYACEVTHQGLSSPVTKSFNRGEC

SEQ ID NO: 317 - protein, 214 aa, Artificial Sequence; identical to SEQ ID NO: 316
  source: /note="Description of Artificial Sequence: Synthetic polypeptide"

SEQ ID NO: 318 - protein, 213 aa, Artificial Sequence
  source: /note="Description of Artificial Sequence: Synthetic polypeptide"
DIQMTQSPSSLSASVGDRVTITCQASQDISNYLNWYQQKPGKAPKLLIYDASNLETGVPSRFSGSGSGTDFSFTISSLQPEDIATYYCQQYDILLTFGGGTKVEIKRTVAAPSVFIFPPSDEQLKSGTASVVCLLNNFYPREAKVQWKVDNALQSGNSQESVTEQDSKDSTYSLSSTLTLSKADYEKHKVYACEVTHQGLSSPVTKSFNRGEC

SEQ ID NO: 319 - protein, 220 aa, Artificial Sequence
  source: /note="Description of Artificial Sequence: Synthetic polypeptide"
DIVMTQSPDSLAVSLGERATINCKSSQSVLSSSNNKNYIAWYQQQPGHPPKLLIYWASTRESGVPDRFSGSGSGTDFTLTISSLQAEDVAVFYCQQYYSTPWTFGQGTKVEIKRTVAAPSVFIFPPSDEQLKSGTASVVCLLNNFYPREAKVQWKVDNALQSGNSQESVTEQDSKDSTYSLSSTLTLSKADYEKHKVYACEVTHQGLSSPVTKSFNRGEC

SEQ ID NO: 320 - protein, 220 aa, Artificial Sequence
  source: /note="Description of Artificial Sequence: Synthetic polypeptide"
DIVMTQSPDSLAVSLGERATINCKSSQSVLSSSNNKNYIAWYQQKPGHPPKLLIYWASTRESGVPDRFSGSGSGTDFTLTISSLQAEDVAVFYCQQYYSTPWTFGQGTKVEIKRTVAAPSVFIFPPSDEQLKSGTASVVCLLNNFYPREAKVQWKVDNALQSGNSQESVTEQDSKDSTYSLSSTLTLSKADYEKHKVYACEVTHQGLSSPVTKSFNRGEC

SEQ ID NO: 321 - protein, 220 aa, Artificial Sequence
  source: /note="Description of Artificial Sequence: Synthetic polypeptide"
DIVMTQSPDSLSVSLGERATINCKSSQSVLSSSNNKNYLAWYQQKPGQPPNLLIYWTSTRDSGVPDRFSGSGSGTDFTLTINSLQAEDVAVYYCQQYYRTPWTFGQGTKVEIKRTVAAPSVFIFPPSDEQLKSGTASVVCLLNNFYPREAKVQWKVDNALQSGNSQESVTEQDSKDSTYSLSSTLTLSKADYEKHKVYACEVTHQGLSSPVTKSFNRGEC

SEQ ID NO: 322 - protein, 220 aa, Artificial Sequence; identical to SEQ ID NO: 321
  source: /note="Description of Artificial Sequence: Synthetic polypeptide"

SEQ ID NO: 323 - protein, 215 aa, Artificial Sequence
  source: /note="Description of Artificial Sequence: Synthetic polypeptide"
EIVLTQSPGTLSLSPGERATLSCRASQSISYSYLAWYQQKPGQAPRLLIYGASSRATGIPDRFSGSGSGTDFTLTISRQEPDDFAVYYCQQYGSSPLTFGGGTKVEIKRTVAAPSVFIFPPSDEQLKSGTASVVCLLNNFYPREAKVQWKVDNALQSGNSQESVTEQDSKDSTYSLSSTLTLSKADYEKHKVYACEVTHQGLSSPVTKSFNRGEC

SEQ ID NO: 324 - protein, 214 aa, Artificial Sequence
  source: /note="Description of Artificial Sequence: Synthetic polypeptide"
EIVMTQSPATLSVSPGERATLSCRASQSVSSNLAWYQQKPGQAPRLLIYGAATRATGIPARVSGSGSGTEFTLTISSLQSEDFAVYYCQQYNNWPLTFGGGTKVEIKRTVAAPSVFIFPPSDEQLKSGTASVVCLLNNFYPREAKVQWKVDNALQSGNSQESVTEQDSKDSTYSLSSTLTLSKADYEKHKVYACEVTHQGLSSPVTKSFNRGEC

SEQ ID NO: 325 - protein, 214 aa, Artificial Sequence
  source: /note="Description of Artificial Sequence: Synthetic polypeptide"
DIQMTQSPSSLSASVGDRVTITCRASQGIRNELGWYQQKPGKAPKRLIYGASSLQSGVPSRFSGSGSGTEFTLTISSLQPEDFVTYYCLQHNSYPFTFGPGTKVDVKRTVAAPSVFIFPPSDEQLKSGTASVVCLLNNFYPREAKVQWKVDNALQSGNSQESVTEQDSKDSTYSLSSTLTLSKADYEKHKVYACEVTHQGLSSPVTKSFNRGEC

SEQ ID NO: 326 - protein, 213 aa, Artificial Sequence
  source: /note="Description of Artificial Sequence: Synthetic polypeptide"
DIQMTQSPSSLSASVGDRVTITCQASQDITNYLNWYQQKPGKAPKLLIYDASNLEPGVPSRFSGSGSGTDFTFTISSLQPEDIATYYCQQYDDLFTFGPGTKVDIKRTVAAPSVFIFPPSDEQLKSGTASVVCLLNNFYPREAKVQWKVDNALQSGNSQESVTEQDSKDSTYSLSSTLTLSKADYEKHKVYACEVTHQGLSSPVTKSFNRGEC

SEQ ID NO: 327 - protein, 214 aa, Artificial Sequence
  source: /note="Description of Artificial Sequence: Synthetic polypeptide"
DIQMTQSPSSVSASVGDRVTITCRASQGLIIWLAWYQQKPGKAPKLLIYAASSLQSGVPSRFSGSGSGTDFTLTISSLQPEDFATYYCQQTNSFPPTFGQGTKVEIKRTVAAPSVFIFPPSDEQLKSGTASVVCLLNNFYPREAKVQWKVDNALQSGNSQESVTEQDSKDSTYSLSSTLTLSKADYEKHKVYACEVTHQGLSSPVTKSFNRGEC

SEQ ID NO: 328 - protein, 214 aa, Artificial Sequence; identical to SEQ ID NO: 327
  source: /note="Description of Artificial Sequence: Synthetic polypeptide"

SEQ ID NO: 329 - protein, 214 aa, Artificial Sequence
  source: /note="Description of Artificial Sequence: Synthetic polypeptide"
DIQMTQSPSSLSASVGDRVTITCRASQGIRNELGWYQQKPGKAPKLLIYGASSLQSGVPSRFSGSGSGTEFTLTISSLQPEDFVTYYCLQHNSYPFTFGQGTKVDVKRTVAAPSVFIFPPSDEQLKSGTASVVCLLNNFYPREAKVQWKVDNALQSGNSQESVTEQDSKDSTYSLSSTLTLSKADYEKHKVYACEVTHQGLSSPVTKSFNRGEC

SEQ ID NO: 330 - protein, 214 aa, Artificial Sequence; identical to SEQ ID NO: 329
  source: /note="Description of Artificial Sequence: Synthetic polypeptide"

SEQ ID NO: 331 - protein, 214 aa, Artificial Sequence; identical to SEQ ID NO: 329
  source: /note="Description of Artificial Sequence: Synthetic polypeptide"

SEQ ID NO: 332 - protein, 214 aa, Artificial Sequence
  source: /note="Description of Artificial Sequence: Synthetic polypeptide"
DIQMTQSPSSLSASVGDRVTITCRASQGIRNELGWYQQKPGKAPKLLIYGASSLQSGVPSRFSGSGSGTEFTLTISSLQPEDFVTYYCLQHNSYPFTFGPGTKVDVKRTVAAPSVFIFPPSDEQLKSGTASVVCLLNNFYPREAKVQWKVDNALQSGNSQESVTEQDSKDSTYSLSSTLTLSKADYEKHKVYACEVTHQGLSSPVTKSFNRGEC

SEQ ID NO: 333 - protein, 214 aa, Artificial Sequence
  source: /note="Description of Artificial Sequence: Synthetic polypeptide"
DIQMTQSPSSLSASVGDRVTITCRASQGIRNELGWYQQKPGKAPKRLIYGASSLQSGVPSRFSGSGSGTEFTLTISSLQPEDFVTYYCLQHNSYPFTFGQGTKVDVKRTVAAPSVFIFPPSDEQLKSGTASVVCLLNNFYPREAKVQWKVDNALQSGNSQESVTEQDSKDSTYSLSSTLTLSKADYEKHKVYACEVTHQGLSSPVTKSFNRGEC

SEQ ID NO: 334 - protein, 214 aa, Artificial Sequence; identical to SEQ ID NO: 329
  source: /note="Description of Artificial Sequence: Synthetic polypeptide"

SEQ ID NO: 335 - protein, 214 aa, Artificial Sequence
  source: /note="Description of Artificial Sequence: Synthetic polypeptide"
DIQMTQSPSSLSASIGDRVTITCRASQDIRDYLGWYQQKPGKAPKLLIYGASSLQSGVPSRFSGSGSGTEFTLTISSLQPEDFATYYCLQHNNYPFTFGQGTKVDIKRTVAAPSVFIFPPSDEQLKSGTASVVCLLNNFYPREAKVQWKVDNALQSGNSQESVTEQDSKDSTYSLSSTLTLSKADYEKHKVYACEVTHQGLSSPVTKSFNRGEC

SEQ ID NO: 336 - protein, 214 aa, Artificial Sequence
  source: /note="Description of Artificial Sequence: Synthetic polypeptide"
DIQMTQSPSSLSASIGDRVTITCRASQDIRDYLGWYQQKPGKAPKRLIYGASSLQSGVPSRFSGSGSGTEFTLTISSLQPEDFATYYCLQHNNYPFTFGQGTKVDIKRTVAAPSVFIFPPSDEQLKSGTASVVCLLNNFYPREAKVQWKVDNALQSGNSQESVTEQDSKDSTYSLSSTLTLSKADYEKHKVYACEVTHQGLSSPVTKSFNRGEC

SEQ ID NO: 337 - protein, 214 aa, Artificial Sequence
  source: /note="Description of Artificial Sequence: Synthetic polypeptide"
DIQMTQSPSSLSASIGDRVTITCRASQDIRDYLGWYQQKPGKAPKLLIYGASSLQSGVPSRFSGSGSGTEFTLTISSLQPEDFATYYCLQHNNYPFTFGPGTKVDIKRTVAAPSVFIFPPSDEQLKSGTASVVCLLNNFYPREAKVQWKVDNALQSGNSQESVTEQDSKDSTYSLSSTLTLSKADYEKHKVYACEVTHQGLSSPVTKSFNRGEC

SEQ ID NO: 338 - protein, 214 aa, Artificial Sequence; identical to SEQ ID NO: 335
  source: /note="Description of Artificial Sequence: Synthetic polypeptide"

SEQ ID NO: 339 - protein, 214 aa, Artificial Sequence; identical to SEQ ID NO: 335
  source: /note="Description of Artificial Sequence: Synthetic polypeptide"

SEQ ID NO: 340 - protein, 214 aa, Artificial Sequence; identical to SEQ ID NO: 335
  source: /note="Description of Artificial Sequence: Synthetic polypeptide"

SEQ ID NO: 341 - protein, 214 aa, Artificial Sequence; identical to SEQ ID NO: 335
  source: /note="Description of Artificial Sequence: Synthetic polypeptide"

SEQ ID NO: 342 - protein, 214 aa, Artificial Sequence
  source: /note="Description of Artificial Sequence: Synthetic polypeptide"
DIQMTQSPSSLSASIGDRVTITCRASQDLRNYLGWYHQKPGKAPKRLIYGASSLQSGVPSRFSGSGSGTEFTLTISSLQPEDFATYYCLQHNNYPFTFGPGTKVDIKRTVAAPSVFIFPPSDEQLKSGTASVVCLLNNFYPREAKVQWKVDNALQSGNSQESVTEQDSKDSTYSLSSTLTLSKADYEKHKVYACEVTHQGLSSPVTKSFNRGEC

SEQ ID NO: 343 - protein, 214 aa, Artificial Sequence
  source: /note="Description of Artificial Sequence: Synthetic polypeptide"
DIQMTQSPSSLSASIGDRVTITCRASQDLRNYLGWYQQKPGKAPKLLIYGASSLQSGVPSRFSGSGSGTEFTLTISSLQPEDFATYYCLQHNNYPFTFGPGTKVDIKRTVAAPSVFIFPPSDEQLKSGTASVVCLLNNFYPREAKVQWKVDNALQSGNSQESVTEQDSKDSTYSLSSTLTLSKADYEKHKVYACEVTHQGLSSPVTKSFNRGEC

SEQ ID NO: 344 - protein, 214 aa, Artificial Sequence; identical to SEQ ID NO: 343
  source: /note="Description of Artificial Sequence: Synthetic polypeptide"

SEQ ID NO: 345 - protein, 214 aa, Artificial Sequence
  source: /note="Description of Artificial Sequence: Synthetic polypeptide"
DIQMTQSPSSLSASIGDRVTITCRASQDLRNYLGWYHQKPGKAPKLLIYGASSLQSGVPSRFSGSGSGTEFTLTISSLQPEDFATYYCLQHNNYPFTFGPGTKVDIKRTVAAPSVFIFPPSDEQLKSGTASVVCLLNNFYPREAKVQWKVDNALQSGNSQESVTEQDSKDSTYSLSSTLTLSKADYEKHKVYACEVTHQGLSSPVTKSFNRGEC

SEQ ID NO: 346 - protein, 214 aa, Artificial Sequence
  source: /note="Description of Artificial Sequence: Synthetic polypeptide"
DIQMTQSPSSLSASIGDRVTITCRASQDLRNYLGWYQQKPGKAPKRLIYGASSLQSGVPSRFSGSGSGTEFTLTISSLQPEDFATYYCLQHNNYPFTFGPGTKVDIKRTVAAPSVFIFPPSDEQLKSGTASVVCLLNNFYPREAKVQWKVDNALQSGNSQESVTEQDSKDSTYSLSSTLTLSKADYEKHKVYACEVTHQGLSSPVTKSFNRGEC

SEQ ID NO: 347 - protein, 214 aa, Artificial Sequence; identical to SEQ ID NO: 346
  source: /note="Description of Artificial Sequence: Synthetic polypeptide"

SEQ ID NO: 348 - protein, 214 aa, Artificial Sequence; identical to SEQ ID NO: 345
  source: /note="Description of Artificial Sequence: Synthetic polypeptide"

SEQ ID NO: 349 - protein, 214 aa, Artificial Sequence; identical to SEQ ID NO: 342
  source: /note="Description of Artificial Sequence: Synthetic polypeptide"

SEQ ID NO: 350 - protein, 214 aa, Artificial Sequence; identical to SEQ ID NO: 343
  source: /note="Description of Artificial Sequence: Synthetic polypeptide"

SEQ ID NO: 351 - protein, 214 aa, Artificial Sequence; identical to SEQ ID NO: 343
  source: /note="Description of Artificial Sequence: Synthetic polypeptide"

SEQ ID NO: 352 - protein, 214 aa, Artificial Sequence
  source: /note="Description of Artificial Sequence: Synthetic polypeptide"
DIQMTQSPSSLSASIGDRVTITCRASQDLRNYLGWYQQKPGKAPKLLIYGASSLQSGVPSRFSGSGSGTEFTLTISSLQPEDFATYYCLQHNNYPFTFGQGTKVDIKRTVAAPSVFIFPPSDEQLKSGTASVVCLLNNFYPREAKVQWKVDNALQSGNSQESVTEQDSKDSTYSLSSTLTLSKADYEKHKVYACEVTHQGLSSPVTKSFNRGEC

SEQ ID NO: 353 - protein, 214 aa, Artificial Sequence; identical to SEQ ID NO: 343
  source: /note="Description of Artificial Sequence: Synthetic polypeptide"

SEQ ID NO: 354 - protein, 213 aa, Artificial Sequence
  source: /note="Description of Artificial Sequence: Synthetic polypeptide"
DIQMTQSPSSLSASVGDRVTITCQASQDISNYLNWYQQKPGKAPKLLIYDASNLETGVPSRFSGSGSGTDFSLTISSLQPEDFATYYCQQYDILLTFGGGTKVEIKRTVAAPSVFIFPPSDEQLKSGTASVVCLLNNFYPREAKVQWKVDNALQSGNSQESVTEQDSKDSTYSLSSTLTLSKADYEKHKVYACEVTHQGLSSPVTKSFNRGEC

SEQ ID NO: 355 - protein, 213 aa, Artificial Sequence; identical to SEQ ID NO: 354
  source: /note="Description of Artificial Sequence: Synthetic polypeptide"

SEQ ID NO: 356 - protein, 213 aa, Artificial Sequence
  source: /note="Description of Artificial Sequence: Synthetic polypeptide"
DIQMTQSPSSLSASVGDRVTITCQASQDISNYLNWYQQKPGKAPKLLIYDASNLETGVPSRFSGSGSGTDFSLTISSLQPEDIATYYCQQYDILLTFGGGTKVEIKRTVAAPSVFIFPPSDEQLKSGTASVVCLLNNFYPREAKVQWKVDNALQSGNSQESVTEQDSKDSTYSLSSTLTLSKADYEKHKVYACEVTHQGLSSPVTKSFNRGEC

SEQ ID NO: 357 - protein, 213 aa, Artificial Sequence
  source: /note="Description of Artificial Sequence: Synthetic polypeptide"
DIQMTQSPSSLSASVGDRVTITCQASQDISNYLNWYQQKPGKAPKLLIYDASNLETGVPSRFSGSGSGTDFSFTISSLQPEDFATYYCQQYDILLTFGGGTKVEIKRTVAAPSVFIFPPSDEQLKSGTASVVCLLNNFYPREAKVQWKVDNALQSGNSQESVTEQDSKDSTYSLSSTLTLSKADYEKHKVYACEVTHQGLSSPVTKSFNRGEC

SEQ ID NO: 358 - protein, 213 aa, Artificial Sequence; identical to SEQ ID NO: 356
  source: /note="Description of Artificial Sequence: Synthetic polypeptide"

SEQ ID NO: 359 - protein, 213 aa, Artificial Sequence; identical to SEQ ID NO: 357
  source: /note="Description of Artificial Sequence: Synthetic polypeptide"

SEQ ID NO: 360 - protein, 213 aa, Artificial Sequence; identical to SEQ ID NO: 318
  source: /note="Description of Artificial Sequence: Synthetic polypeptide"

SEQ ID NO: 361 - protein, 213 aa, Artificial Sequence; identical to SEQ ID NO: 354
  source: /note="Description of Artificial Sequence: Synthetic polypeptide"

SEQ ID NO: 362 - protein, 213 aa, Artificial Sequence; identical to SEQ ID NO: 354
  source: /note="Description of Artificial Sequence: Synthetic polypeptide"

SEQ ID NO: 363 - protein, 214 aa, Artificial Sequence; identical to SEQ ID NO: 316
  source: /note="Description of Artificial Sequence: Synthetic polypeptide"

SEQ ID NO: 364 - protein, 214 aa, Artificial Sequence; identical to SEQ ID NO: 316
  source: /note="Description of Artificial Sequence: Synthetic polypeptide"

SEQ ID NO: 365 - protein, 214 aa, Artificial Sequence; identical to SEQ ID NO: 335
  source: /note="Description of Artificial Sequence: Synthetic polypeptide"

SEQ ID NO: 366 - protein, 214 aa, Artificial Sequence; identical to SEQ ID NO: 335
  source: /note="Description of Artificial Sequence: Synthetic polypeptide"

SEQ ID NO: 367 - protein, 214 aa, Artificial Sequence; identical to SEQ ID NO: 337
  source: /note="Description of Artificial Sequence: Synthetic polypeptide"

SEQ ID NO: 368 - protein, 214 aa, Artificial Sequence; identical to SEQ ID NO: 337
  source: /note="Description of Artificial Sequence: Synthetic polypeptide"

SEQ ID NO: 369 - protein, 214 aa, Artificial Sequence; identical to SEQ ID NO: 337
  source: /note="Description of Artificial Sequence: Synthetic polypeptide"

SEQ ID NO: 370 - protein, 213 aa, Artificial Sequence
  source: /note="Description of Artificial Sequence: Synthetic polypeptide"
DIQMTQSPSSLSASVGDRVTITCQASQDITNYLNWYQQKPGKAPKLLIYDASNLEPGVPSRFSGSGSGTDFTLTISSLQPEDFATYYCQQYDDLFTFGPGTKVDIKRTVAAPSVFIFPPSDEQLKSGTASVVCLLNNFYPREAKVQWKVDNALQSGNSQESVTEQDSKDSTYSLSSTLTLSKADYEKHKVYACEVTHQGLSSPVTKSFNRGEC

SEQ ID NO: 371 - protein, 213 aa, Artificial Sequence
  source: /note="Description of Artificial Sequence: Synthetic polypeptide"
DIQMTQSPSSLSASVGDRVTITCQASQDITNYLNWYQQKPGKAPKLLIYDASNLEPGVPSRFSGSGSGTDFTLTISSLQPEDIATYYCQQYDDLFTFGPGTKVDIKRTVAAPSVFIFPPSDEQLKSGTASVVCLLNNFYPREAKVQWKVDNALQSGNSQESVTEQDSKDSTYSLSSTLTLSKADYEKHKVYACEVTHQGLSSPVTKSFNRGEC

SEQ ID NO: 372 - protein, 213 aa, Artificial Sequence; identical to SEQ ID NO: 370
  source: /note="Description of Artificial Sequence: Synthetic polypeptide"

SEQ ID NO: 373 - protein, 213 aa, Artificial Sequence
  source: /note="Description of Artificial Sequence: Synthetic polypeptide"
DIQMTQSPSSLSASVGDRVTITCQASQDITNYLNWYQQKPGKAPKLLIYDASNLEPGVPSRFSGSGSGTDFTFTISSLQPEDFATYYCQQYDDLFTFGPGTKVDIKRTVAAPSVFIFPPSDEQLKSGTASVVCLLNNFYPREAKVQWKVDNALQSGNSQESVTEQDSKDSTYSLSSTLTLSKADYEKHKVYACEVTHQGLSSPVTKSFNRGEC

SEQ ID NO: 374 - protein, 213 aa, Artificial Sequence; identical to SEQ ID NO: 371
  source: /note="Description of Artificial Sequence: Synthetic polypeptide"

SEQ ID NO: 375 - protein, 213 aa, Artificial Sequence; identical to SEQ ID NO: 373
  source: /note="Description of Artificial Sequence: Synthetic polypeptide"

SEQ ID NO: 376 - protein, 213 aa, Artificial Sequence; identical to SEQ ID NO: 326
  source: /note="Description of Artificial Sequence: Synthetic polypeptide"

SEQ ID NO: 377 - protein, 213 aa, Artificial Sequence; identical to SEQ ID NO: 370
  source: /note="Description of Artificial Sequence: Synthetic polypeptide"

SEQ ID NO: 378 - protein, 213 aa, Artificial Sequence; identical to SEQ ID NO: 370
  source: /note="Description of Artificial Sequence: Synthetic polypeptide"

SEQ ID NO: 379 - protein, 213 aa, Artificial Sequence
  source: /note="Description of Artificial Sequence: Synthetic polypeptide"
DIQMTQSPSSLSASVGDRVTITCQASQDITNYLNWYQQKPGKAPKLLIYDASNLEPGVPSRFSGSGSGTDFTLTISSLQPEDFATYYCQQYDDLFTFGQGTKVDIKRTVAAPSVFIFPPSDEQLKSGTASVVCLLNNFYPREAKVQWKVDNALQSGNSQESVTEQDSKDSTYSLSSTLTLSKADYEKHKVYACEVTHQGLSSPVTKSFNRGEC

SEQ ID NO: 380 - protein, 213 aa, Artificial Sequence; identical to SEQ ID NO: 379
  source: /note="Description of Artificial Sequence: Synthetic polypeptide"

SEQ ID NO: 381 - protein, 214 aa, Artificial Sequence
  source: /note="Description of Artificial Sequence: Synthetic polypeptide"
EIVLTQSPGTLSLSPGERATLSCRASQIFTSTYLAWYQQKPGQAPRLLIYGASSRATGIPDRFSGSGSGTDFTLTISRLEPEDFAVYYCQQYGSSPRFGQGTRLEIKRTVAAPSVFIFPPSDEQLKSGTASVVCLLNNFYPREAKVQWKVDNALQSGNSQESVTEQDSKDSTYSLSSTLTLSKADYEKHKVYACEVTHQGLSSPVTKSFNRGEC

SEQ ID NO: 382 - protein, 214 aa, Artificial Sequence; identical to SEQ ID NO: 381
  source: /note="Description of Artificial Sequence: Synthetic polypeptide"

SEQ ID NO: 383 - protein, 214 aa, Artificial Sequence; identical to SEQ ID NO: 381
  source: /note="Description of Artificial Sequence: Synthetic polypeptide"

SEQ ID NO: 384 - protein, 214 aa, Artificial Sequence; identical to SEQ ID NO: 381
  source: /note="Description of Artificial Sequence: Synthetic polypeptide"

SEQ ID NO: 385 - protein, 214 aa, Artificial Sequence
  source: /note="Description of Artificial Sequence: Synthetic polypeptide"
EIVMTQSPATLSVSPGERATLSCRASQSVSSNLAWYQQKPGQAPRLLIYGAATRATGIPARFSGSGSGTEFTLTISSLQSEDFAVYYCQQYNNWPLTFGGGTKVEIKRTVAAPSVFIFPPSDEQLKSGTASVVCLLNNFYPREAKVQWKVDNALQSGNSQESVTEQDSKDSTYSLSSTLTLSKADYEKHKVYACEVTHQGLSSPVTKSFNRGEC

SEQ ID NO: 386 - protein, 214 aa, Artificial Sequence; identical to SEQ ID NO: 385
  source: /note="Description of Artificial Sequence: Synthetic polypeptide"

SEQ ID NO: 387 - protein, 214 aa, Artificial Sequence; identical to SEQ ID NO: 385
  source: /note="Description of Artificial Sequence: Synthetic polypeptide"

SEQ ID NO: 388 - protein, 214 aa, Artificial Sequence; identical to SEQ ID NO: 324
  source: /note="Description of Artificial Sequence: Synthetic polypeptide"

SEQ ID NO: 389 - protein, 214 aa, Artificial Sequence
  source: /note="Description of Artificial Sequence: Synthetic polypeptide"
EIVMTQSPATLSVSPGERATLSCRASQSVSSNLAWYQQKPGQAPRLLIYGAATRATGIPARFSGSGSGTEFTLTISSLEPEDFAVYYCQQYNNFPLTFGGGTKVEIKRTVAAPSVFIFPPSDEQLKSGTASVVCLLNNFYPREAKVQWKVDNALQSGNSQESVTEQDSKDSTYSLSSTLTLSKADYEKHKVYACEVTHQGLSSPVTKSFNRGEC

SEQ ID NO: 390 - protein, 214 aa, Artificial Sequence
  source: /note="Description of Artificial Sequence: Synthetic polypeptide"
EIVMTQSPATLSVSPGERATLSCRASQSVSSNLAWYQQKPGQAPRLLIYGAATRATGIPARFSGSGSGTEFTLTISSLEPEDFAVYYCQQYNNYPLTFGGGTKVEIKRTVAAPSVFIFPPSDEQLKSGTASVVCLLNNFYPREAKVQWKVDNALQSGNSQESVTEQDSKDSTYSLSSTLTLSKADYEKHKVYACEVTHQGLSSPVTKSFNRGEC

SEQ ID NO: 391 - protein, 214 aa, Artificial Sequence
  source: /note="Description of Artificial Sequence: Synthetic polypeptide"
EIVMTQSPATLSVSPGERATLSCRASQSVSSNLAWYQQKPGQAPRLLIYGAATRATGIPARFSGSGSGTEFTLTISSLEPEDFAVYYCQQYNNWPLTFGGGTKVEIKRTVAAPSVFIFPPSDEQLKSGTASVVCLLNNFYPREAKVQWKVDNALQSGNSQESVTEQDSKDSTYSLSSTLTLSKADYEKHKVYACEVTHQGLSSPVTKSFNRGEC

SEQ ID NO: 392 - protein, 214 aa, Artificial Sequence; identical to SEQ ID NO: 391
  source: /note="Description of Artificial Sequence: Synthetic polypeptide"

SEQ ID NO: 393 - protein, 215 aa, Artificial Sequence
  source: /note="Description of Artificial Sequence: Synthetic polypeptide"
EIVLTQSPGTLSLSPGERATLSCRASQSISYSYLAWYQQKPGQAPRLLIYGASSRATGIPDRFSGSGSGTDFTLTISRLEPDDFAVYYCQQYGSSPLTFGGGTKVEIKRTVAAPSVFIFPPSDEQLKSGTASVVCLLNNFYPREAKVQWKVDNALQSGNSQESVTEQDSKDSTYSLSSTLTLSKADYEKHKVYACEVTHQGLSSPVTKSFNRGEC

SEQ ID NO: 394 - protein, 215 aa, Artificial Sequence; identical to SEQ ID NO: 323
  source: /note="Description of Artificial Sequence: Synthetic polypeptide"

SEQ ID NO: 395 - protein, 215 aa, Artificial Sequence; identical to SEQ ID NO: 393
  source: /note="Description of Artificial Sequence: Synthetic polypeptide"

SEQ ID NO: 396 - protein, 215 aa, Artificial Sequence; identical to SEQ ID NO: 393
  source: /note="Description of Artificial Sequence: Synthetic polypeptide"

SEQ ID NO: 397 - protein, 215 aa, Artificial Sequence; identical to SEQ ID NO: 393
  source: /note="Description of Artificial Sequence: Synthetic polypeptide"

SEQ ID NO: 398 - protein, 215 aa, Artificial Sequence; identical to SEQ ID NO: 323
  source: /note="Description of Artificial Sequence: Synthetic polypeptide"

SEQ ID NO: 399 - protein, 215 aa, Artificial Sequence; identical to SEQ ID NO: 323
  source: /note="Description of Artificial Sequence: Synthetic polypeptide"

SEQ ID NO: 400 - protein, 220 aa, Artificial Sequence; identical to SEQ ID NO: 319
  source: /note="Description of Artificial Sequence: Synthetic polypeptide"

SEQ ID NO: 401 - protein, 220 aa, Artificial Sequence; identical to SEQ ID NO: 319
  source: /note="Description of Artificial Sequence: Synthetic polypeptide"

SEQ ID NO: 402 - protein, 220 aa, Artificial Sequence; identical to SEQ ID NO: 319
  source: /note="Description of Artificial Sequence: Synthetic polypeptide"

SEQ ID NO: 403 - protein, 220 aa, Artificial Sequence; identical to SEQ ID NO: 319
  source: /note="Description of Artificial Sequence: Synthetic polypeptide"

SEQ ID NO: 404 - protein, 220 aa, Artificial Sequence; identical to SEQ ID NO: 319
  source: /note="Description of Artificial Sequence: Synthetic polypeptide"

SEQ ID NO: 405 - protein, 220 aa, Artificial Sequence; identical to SEQ ID NO: 319
  source: /note="Description of Artificial Sequence: Synthetic polypeptide"

SEQ ID NO: 406 - protein, 220 aa, Artificial Sequence; identical to SEQ ID NO: 319
  source: /note="Description of Artificial Sequence: Synthetic polypeptide"

SEQ ID NO: 407 - protein, 220 aa, Artificial Sequence; identical to SEQ ID NO: 319
  source: /note="Description of Artificial Sequence: Synthetic polypeptide"

SEQ ID NO: 408 - protein, 220 aa, Artificial Sequence; identical to SEQ ID NO: 319
  source: /note="Description of Artificial Sequence: Synthetic polypeptide"

SEQ ID NO: 409 - protein, 220 aa, Artificial Sequence
  source: /note="Description of Artificial Sequence: Synthetic polypeptide"
DIVMTQSPDSLAVSLGERATINCKSSQSVLSSSNNKNYIAWYQQKPGQPPKLLIYWASTRESGVPDRFSGSGSGTDFTLTISSLQAEDVAVFYCQQYYSTPWTFGQGTKVEIKRTVAAPSVFIFPPSDEQLKSGTASVVCLLNNFYPREAKVQWKVDNALQSGNSQESVTEQDSKDSTYSLSSTLTLSKADYEKHKVYACEVTHQGLSSPVTKSFNRGEC

SEQ ID NO: 410 - protein, 220 aa, Artificial Sequence; identical to SEQ ID NO: 409
  source: /note="Description of Artificial Sequence: Synthetic polypeptide"

SEQ ID NO: 411 - protein, 220 aa, Artificial Sequence
  source: /note="Description of Artificial Sequence: Synthetic polypeptide"
DIVMTQSPDSLSVSLGERATINCKSSQSVLSSSNNKNYLAWYQQKPGQPPNLLIYWTSTRESGVPDRFSGSGSGTDFTLTINSLQAEDVAVYYCQQYYRTPWTFGQGTKVEIKRTVAAPSVFIFPPSDEQLKSGTASVVCLLNNFYPREAKVQWKVDNALQSGNSQESVTEQDSKDSTYSLSSTLTLSKADYEKHKVYACEVTHQGLSSPVTKSFNRGEC

SEQ ID NO: 412 - protein, 220 aa, Artificial Sequence; identical to SEQ ID NO: 411
  source: /note="Description of Artificial Sequence: Synthetic polypeptide"

SEQ ID NO: 413 - protein, 220 aa, Artificial Sequence; identical to SEQ ID NO: 321
  source: /note="Description of Artificial Sequence: Synthetic polypeptide"

SEQ ID NO: 414 - protein, 220 aa, Artificial Sequence; identical to SEQ ID NO: 411
  source: /note="Description of Artificial Sequence: Synthetic polypeptide"

SEQ ID NO: 415 - protein, 220 aa, Artificial Sequence; identical to SEQ ID NO: 411
  source: /note="Description of Artificial Sequence: Synthetic polypeptide"

SEQ ID NO: 416 - protein, 220 aa, Artificial Sequence; identical to SEQ ID NO: 321
  source: /note="Description of Artificial Sequence: Synthetic polypeptide"

SEQ ID NO: 417 - protein, 220 aa, Artificial Sequence; identical to SEQ ID NO: 321
  source: /note="Description of Artificial Sequence: Synthetic polypeptide"

SEQ ID NO: 418 - protein, 220 aa, Artificial Sequence
  source: /note="Description of Artificial Sequence: Synthetic polypeptide"
DIVMTQSPDSLAVSLGERATINCKSSQSVLSSSNNKNYLAWYQQKPGQPPKLLIYWTSTRESGVPDRFSGSGSGTDFTLTINSLQAEDVAVYYCQQYYRTPWTFGQGTKVEIKRTVAAPSVFIFPPSDEQLKSGTASVVCLLNNFYPREAKVQWKVDNALQSGNSQESVTEQDSKDSTYSLSSTLTLSKADYEKHKVYACEVTHQGLSSPVTKSFNRGEC

SEQ ID NO: 419 - protein, 220 aa, Artificial Sequence; identical to SEQ ID NO: 411
  source: /note="Description of Artificial Sequence: Synthetic polypeptide"

SEQ ID NO: 420 - protein, 220 aa, Artificial Sequence; identical to SEQ ID NO: 320
  source: /note="Description of Artificial Sequence: Synthetic polypeptide"

SEQ ID NO: 421 - protein, 220 aa, Artificial Sequence; identical to SEQ ID NO: 320
  source: /note="Description of Artificial Sequence: Synthetic polypeptide"

SEQ ID NO: 422 - protein, 220 aa, Artificial Sequence; identical to SEQ ID NO: 320
  source: /note="Description of Artificial Sequence: Synthetic polypeptide"

SEQ ID NO: 423 - protein, 220 aa, Artificial Sequence; identical to SEQ ID NO: 409
  source: /note="Description of Artificial Sequence: Synthetic polypeptide"

SEQ ID NO: 424 - protein, 220 aa, Artificial Sequence; identical to SEQ ID NO: 409
  source: /note="Description of Artificial Sequence: Synthetic polypeptide"

SEQ ID NO: 425 - protein, 220 aa, Artificial Sequence; identical to SEQ ID NO: 321
  source: /note="Description of Artificial Sequence: Synthetic polypeptide"

SEQ ID NO: 426 - protein, 220 aa, Artificial Sequence; identical to SEQ ID NO: 321
  source: /note="Description of Artificial Sequence: Synthetic polypeptide"

SEQ ID NO: 427 - protein, 220 aa, Artificial Sequence; identical to SEQ ID NO: 321
  source: /note="Description of Artificial Sequence: Synthetic polypeptide"

SEQ ID NO: 428 - protein, 220 aa, Artificial Sequence; identical to SEQ ID NO: 321
  source: /note="Description of Artificial Sequence: Synthetic polypeptide"

SEQ ID NO: 429 - protein, 220 aa, Artificial Sequence; identical to SEQ ID NO: 321
  source: /note="Description of Artificial Sequence: Synthetic polypeptide"

SEQ ID NO: 430 - protein, 220 aa, Artificial Sequence; identical to SEQ ID NO: 321
  source: /note="Description of Artificial Sequence: Synthetic polypeptide"

SEQ ID NO: 431 - protein, 220 aa, Artificial Sequence; identical to SEQ ID NO: 321
  source: /note="Description of Artificial Sequence: Synthetic polypeptide"

SEQ ID NO: 432 - protein, 220 aa, Artificial Sequence; identical to SEQ ID NO: 411
  source: /note="Description of Artificial Sequence: Synthetic polypeptide"

SEQ ID NO: 433 - protein, 220 aa, Artificial Sequence; identical to SEQ ID NO: 411
  source: /note="Description of Artificial Sequence: Synthetic polypeptide"

SEQ ID NO: 434 - protein, 220 aa, Artificial Sequence; identical to SEQ ID NO: 411
  source: /note="Description of Artificial Sequence: Synthetic polypeptide"

SEQ ID NO: 435 - protein, 220 aa, Artificial Sequence; identical to SEQ ID NO: 411
  source: /note="Description of Artificial Sequence: Synthetic polypeptide"

SEQ ID NO: 436 - protein, 220 aa, Artificial Sequence
  source: /note="Description of Artificial Sequence: Synthetic polypeptide"
DIVMTQSPDSLAVSLGERATINCKSSQSVLSSSNNKNYLAWYQQKPGQPPKLLIYWTSTRDSGVPDRFSGSGSGTDFTLTINSLQAEDVAVYYCQQYYRTPWTFGQGTKVEIKRTVAAPSVFIFPPSDEQLKSGTASVVCLLNNFYPREAKVQWKVDNALQSGNSQESVTEQDSKDSTYSLSSTLTLSKADYEKHKVYACEVTHQGLSSPVTKSFNRGEC

SEQ ID NO: 437 - protein, 220 aa, Artificial Sequence; identical to SEQ ID NO: 418
  source: /note="Description of Artificial Sequence: Synthetic polypeptide"

SEQ ID NO: 438 - protein, 216 aa, Artificial Sequence
  source: /note="Description of Artificial Sequence: Synthetic polypeptide"
QSVLTQPPSASGTPGQRVTISCSGSSSNIGSQTVNWYQHLPGTAPKLLIYTNNQRPSGVPDRFSGSKSGTSASLAISGLQSEDEADYFCATFDESLSGPVFGGGTKLTVLGQPKAAPSVTLFPPSSEELQANKATLVCLISDFYPGAVTVAWKADSSPVKAGVETTTPSKQSNNKYAASSYLSLTPEQWKSHRSYSCQVTHEGSTVEKTVAPTECS

SEQ ID NO: 439 - protein, 216 aa, Artificial Sequence
  source: /note="Description of Artificial Sequence: Synthetic polypeptide"
QSVLTQPPSASGTPGQRVTISCSGSSSNIGSQTVNWYQHLPGTAPKLLIYTNNQRPSGVPDRFSGSKSGTSASLAISGLQSEDEADYFCATFDESLQGPVFGGGTKLTVLGQPKAAPSVTLFPPSSEELQANKATLVCLISDFYPGAVTVAWKADSSPVKAGVETTTPSKQSNNKYAASSYLSLTPEQWKSHRSYSCQVTHEGSTVEKTVAPTECS

SEQ ID NO: 440 - protein, 216 aa, Artificial Sequence
  source: /note="Description of Artificial Sequence: Synthetic polypeptide"
QSVLTQPPSASGTPGQRVTISCSGSSSNIGSNYVNWYQHLPGTAPKLLIYTNNQRPSGVPDRFSGSKSGTSASLAISGLQSEDEADYFCATFDESLSGPVFGGGTKLTVLGQPKAAPSVTLFPPSSEELQANKATLVCLISDFYPGAVTVAWKADSSPVKAGVETTTPSKQSNNKYAASSYLSLTPEQWKSHRSYSCQVTHEGSTVEKTVAPTECS

SEQ ID NO: 441 - protein, 216 aa, Artificial Sequence
  source: /note="Description of Artificial Sequence: Synthetic polypeptide"
QSVLTQPPSASGTPGQRVTISCSGSSSNIGSNYVNWYQHLPGTAPKLLIYTNNQRPSGVPDRFSGSKSGTSASLAISGLQSEDEADYFCATFDESLQGPVFGGGTKLTVLGQPKAAPSVTLFPPSSEELQANKATLVCLISDFYPGAVTVAWKADSSPVKAGVETTTPSKQSNNKYAASSYLSLTPEQWKSHRSYSCQVTHEGSTVEKTVAPTECS

SEQ ID NO: 442 - protein, 216 aa, Artificial Sequence
  source: /note="Description of Artificial Sequence: Synthetic polypeptide"
QSVLTQPPSASGTPGQRVTISCSGSSSNIGSQTVNWYQHLPGTAPKLLIYTNNQRPSGVPDRFSGSKSGTSASLAISGLQSEDEADYFCATFDDSLNGPVFGGGTKLTVLGQPKAAPSVTLFPPSSEELQANKATLVCLISDFYPGAVTVAWKADSSPVKAGVETTTPSKQSNNKYAASSYLSLTPEQWKSHRSYSCQVTHEGSTVEKTVAPTECS

SEQ ID NO: 443 - protein, 216 aa, Artificial Sequence
  source: /note="Description of Artificial Sequence: Synthetic polypeptide"
QSVLTQPPSASGTPGQRVTISCSGSSSNIGSNYVNWYQHLPGTAPKLLIYTNNQRPSGVPDRFSGSKSGTSASLAISGLQSEDEADYFCATFDDSLNGPVFGGGTKLTVLGQPKAAPSVTLFPPSSEELQANKATLVCLISDFYPGAVTVAWKADSSPVKAGVETTTPSKQSNNKYAASSYLSLTPEQWKSHRSYSCQVTHEGSTVEKTVAPTECS

SEQ ID NO: 444 - protein, 216 aa, Artificial Sequence
  source: /note="Description of Artificial Sequence: Synthetic polypeptide"
QSVLTQPPSASGTPGQRVTISCSGSSSNIGSNTVNWYQHLPGTAPKLLIYTNNQRPSGVPDRFSGSKSGTSASLAISGLQSEDEADYFCATFDESLNGPVFGGGTKLTVLGQPKAAPSVTLFPPSSEELQANKATLVCLISDFYPGAVTVAWKADSSPVKAGVETTTPSKQSNNKYAASSYLSLTPEQWKSHRSYSCQVTHEGSTVEKTVAPTECS

SEQ ID NO: 445 - protein, 216 aa, Artificial Sequence
  source: /note="Description of Artificial Sequence: Synthetic polypeptide"
QSVLTQPPSASGTPGQRVTISCSGSSSNIGSNTVNWYQHLPGTAPKLLIYTNNQRPSGVPDRFSGSKSGTSASLAISGLQSEDEADYFCATFDDSLQGPVFGGGTKLTVLGQPKAAPSVTLFPPSSEELQANKATLVCLISDFYPGAVTVAWKADSSPVKAGVETTTPSKQSNNKYAASSYLSLTPEQWKSHRSYSCQVTHEGSTVEKTVAPTECS

SEQ ID NO: 446 - protein, 216 aa, Artificial Sequence
  source: /note="Description of Artificial Sequence: Synthetic polypeptide"
QSVLTQPPSASGTPGQRVTISCSGSSSNIGSNTVNWYQHLPGTAPKLLIYTNNQRPSGVPDRFSGSKSGTSASLAISGLQSEDEADYFCATFDDSLSGPVFGGGTKLTVLGQPKAAPSVTLFPPSSEELQANKATLVCLISDFYPGAVTVAWKADSSPVKAGVETTTPSKQSNNKYAASSYLSLTPEQWKSHRSYSCQVTHEGSTVEKTVAPTECS

SEQ ID NO: 447 - protein, 216 aa, Artificial Sequence
  source: /note="Description of Artificial Sequence: Synthetic polypeptide"
QSVLTQPPSASGTPGQRVTISCSGSSSNIGSNTVNWYQHLPGTAPKLLIYTNNQRPSGVPDRFSGSKSGTSASLAISGLQSEDEADYFCATFDDSLNAPVFGGGTKLTVLGQPKAAPSVTLFPPSSEELQANKATLVCLISDFYPGAVTVAWKADSSPVKAGVETTTPSKQSNNKYAASSYLSLTPEQWKSHRSYSCQVTHEGSTVEKTVAPTECS

SEQ ID NO: 448 - protein, 216 aa, Artificial Sequence
  source: /note="Description of Artificial Sequence: Synthetic polypeptide"
QSVLTQPPSASGTPGQRVTISCSGSSSNIGSNTVNWYQHLPGTAPKLLIYTNNQRPSGVPDRFSGSKSGTSASLAISGLQSEDEADYFCATFDSSLNGPVFGGGTKLTVLGQPKAAPSVTLFPPSSEELQANKATLVCLISDFYPGAVTVAWKADSSPVKAGVETTTPSKQSNNKYAASSYLSLTPEQWKSHRSYSCQVTHEGSTVEKTVAPTECS

SEQ ID NO: 449 - protein, 216 aa, Artificial Sequence
  source: /note="Description of Artificial Sequence: Synthetic polypeptide"
QSVLTQPPSASGTPGQRVTISCSGSSSNIGSNYVNWYQHLPGTAPKLLIYTNNQRPSGVPDRFSGSKSGTSASLAISGLQSEDEADYFCATFDSSLNAPVFGGGTKLTVLGQPKAAPSVTLFPPSSEELQANKATLVCLISDFYPGAVTVAWKADSSPVKAGVETTTPSKQSNNKYAASSYLSLTPEQWKSHRSYSCQVTHEGSTVEKTVAPTECS

SEQ ID NO: 450 - protein, 216 aa, Artificial Sequence; identical to SEQ ID NO: 449
  source: /note="Description of Artificial Sequence: Synthetic polypeptide"

SEQ ID NO: 451 - protein, 216 aa, Artificial Sequence; identical to SEQ ID NO: 438
  source: /note="Description of Artificial Sequence: Synthetic polypeptide"

SEQ ID NO: 452 - protein, 214 aa, Artificial Sequence
  source: /note="Description of Artificial Sequence: Synthetic polypeptide"
DIQMTQSPSSLSASIGDRVTITCRASQDLRNYLGWYQQKPGKAPKRLIYGASSLQSGVPSRFSGSGSGTEFTLTISSLQPEDFATYYCLQHNNYPFTFGQGTKVDIKRTVAAPSVFIFPPSDEQLKSGTASVVCLLNNFYPREAKVQWKVDNALQSGNSQESVTEQDSKDSTYSLSSTLTLSKADYEKHKVYACEVTHQGLSSPVTKSFNRGEC

SEQ ID NO: 453 - protein, 214 aa, Artificial Sequence; identical to SEQ ID NO: 336
  source: /note="Description of Artificial Sequence: Synthetic polypeptide"

SEQ ID NO: 454 - protein, 216 aa, Artificial Sequence
  source: /note="Description of Artificial Sequence: Synthetic polypeptide"
QSVLTQPPSASGTPGQRVTISCSGSSSNIGSNTVNWYQQLPGTAPKLLIYTNNQRPSGVPDRFSGSKSGTSASLAISGLQSEDEADYFCATFDSSLSGPVFGGGTKLTVLGQPKAAPSVTLFPPSSEELQANKATLVCLISDFYPGAVTVAWKADSSPVKAGVETTTPSKQSNNKYAASSYLSLTPEQWKSHRSYSCQVTHEGSTVEKTVAPTECS

SEQ ID NO: 455 - protein, 214 aa, Artificial Sequence
  source: /note="Description of Artificial Sequence: Synthetic polypeptide"
DIQLTQSPSSLSASVGDRVTITCRASQTISRFLNWYQQKPGKAPELLIYVASSLQSGVPSRFSGSGSGTDFTLTISSLQPEDFATYYCQQSYSTLISFGQGTKLEITRTVAAPSVFIFPPSDEQLKSGTASVVCLLNNFYPREAKVQWKVDNALQSGNSQESVTEQDSKDSTYSLSSTLTLSKADYEKHKVYACEVTHQGLSSPVTKSFNRGEC

SEQ ID NO: 456 - protein, 216 aa, Artificial Sequence
  source: /note="Description of Artificial Sequence: Synthetic polypeptide"
QSVLTQPPSVSAAPGQKVTISCSGSSSNIGNNYVSWYEQFPGTAPKLLIYDNNKRPSGIPDRFSGSKSGTSATLGITGLQTGDEADYYCGTWDSSLSAVVFGGGTKLTVLGQPKAAPSVTLFPPSSEELQANKATLVCLISDFYPGAVTVAWKADSSPVKAGVETTTPSKQSNNKYAASSYLSLTPEQWKSHRSYSCQVTHEGSTVEKTVAPTECS

SEQ ID NO: 457 - protein, 214 aa, Artificial Sequence
  source: /note="Description of Artificial Sequence: Synthetic polypeptide"
DIQLTQSPSSLSASVGDRVTITCRASQTISRFLNWYQQKPGKAPELLIYVASSLQSGVPSRFSGSGSGTDFTLTISSLQPEDFATYYCQQSYSTLISFGQGTKLEIKRTVAAPSVFIFPPSDEQLKSGTASVVCLLNNFYPREAKVQWKVDNALQSGNSQESVTEQDSKDSTYSLSSTLTLSKADYEKHKVYACEVTHQGLSSPVTKSFNRGEC

SEQ ID NO: 458 - protein, 214 aa, Artificial Sequence; identical to SEQ ID NO: 457
  source: /note="Description of Artificial Sequence: Synthetic polypeptide"

SEQ ID NO: 459 - protein, 214 aa, Artificial Sequence; identical to SEQ ID NO: 455
  source: /note="Description of Artificial Sequence: Synthetic polypeptide"

SEQ ID NO: 460 - protein, 214 aa, Artificial Sequence
  source: /note="Description of Artificial Sequence: Synthetic polypeptide"
DIQLTQSPSSLSASVGDRVTITCRASQTISRFLNWYQQKPGKAPKLLIYVASSLQSGVPSRFSGSGSGTDFTLTISSLQPEDFATYYCQQSYSTLISFGQGTKLEIKRTVAAPSVFIFPPSDEQLKSGTASVVCLLNNFYPREAKVQWKVDNALQSGNSQESVTEQDSKDSTYSLSSTLTLSKADYEKHKVYACEVTHQGLSSPVTKSFNRGEC

SEQ ID NO: 461 - protein, 214 aa, Artificial Sequence; identical to SEQ ID NO: 457
  source: /note="Description of Artificial Sequence: Synthetic polypeptide"

SEQ ID NO: 462 - protein, 214 aa, Artificial Sequence; identical to SEQ ID NO: 457
  source: /note="Description of Artificial Sequence: Synthetic polypeptide"

SEQ ID NO: 463 - protein, 216 aa, Artificial Sequence
  source: /note="Description of Artificial Sequence: Synthetic polypeptide"
QSVLTQPPSVSAAPGQKVTISCSGSSSNIGNNYVSWYQQLPGTAPKLLIYDNNKRPSGIPDRFSGSKSGTSATLGITGLQTGDEADYYCGTWDSSLSAVVFGGGTKLTVLGQPKAAPSVTLFPPSSEELQANKATLVCLISDFYPGAVTVAWKADSSPVKAGVETTTPSKQSNNKYAASSYLSLTPEQWKSHRSYSCQVTHEGSTVEKTVAPTECS

SEQ ID NO: 464 - protein, 216 aa, Artificial Sequence; identical to SEQ ID NO: 463
  source: /note="Description of Artificial Sequence: Synthetic polypeptide"

SEQ ID NO: 465 - protein, 216 aa, Artificial Sequence; identical to SEQ ID NO: 456
  source: /note="Description of Artificial Sequence: Synthetic polypeptide"

SEQ ID NO: 466 - protein, 216 aa, Artificial Sequence
  source: /note="Description of Artificial Sequence: Synthetic polypeptide"
QSVLTQPPSVSAAPGQKVTISCSGSSSNIGNNYVSWYQQLPGTAPKLLIYDNNKRPSGIPDRFSGSKSGTSATLAITGLQTGDEADYYCGTFESSLSAVVFGGGTKLTVLGQPKAAPSVTLFPPSSEELQANKATLVCLISDFYPGAVTVAWKADSSPVKAGVETTTPSKQSNNKYAASSYLSLTPEQWKSHRSYSCQVTHEGSTVEKTVAPTECS

SEQ ID NO: 467 - protein, 216 aa, Artificial Sequence
  source: /note="Description of Artificial Sequence: Synthetic polypeptide"
QSVLTQPPSVSAAPGQKVTISCSGSSSNIGNNYVSWYQQLPGTAPKLLIYDNNKRPSGIPDRFSGSKSGTSATLAITGLQTGDEADYYCGTWDSSLSAVVFGGGTKLTVLGQPKAAPSVTLFPPSSEELQANKATLVCLISDFYPGAVTVAWKADSSPVKAGVETTTPSKQSNNKYAASSYLSLTPEQWKSHRSYSCQVTHEGSTVEKTVAPTECS

SEQ ID NO: 468 - protein, 216 aa, Artificial Sequence; identical to SEQ ID NO: 467
  source: /note="Description of Artificial Sequence: Synthetic polypeptide"

SEQ ID NO: 469 - protein, 216 aa, Artificial Sequence; identical to SEQ ID NO: 463
  source: /note="Description of Artificial Sequence: Synthetic polypeptide"

SEQ ID NO: 470 - protein, 216 aa, Artificial Sequence; identical to SEQ ID NO: 466
  source: /note="Description of Artificial Sequence: Synthetic polypeptide"

SEQ ID NO: 471 - protein, 214 aa, Artificial Sequence
  source: /note="Description of Artificial Sequence: Synthetic polypeptide"
DIQLTQSPSSLSASVGDRVTITCRASQTISRFLNWYQQKPGKAPKLLIYVASSLQSGVPSRFSGSGSGTDFTLTISSLQPEDFATYYCQQSYSTLLSFGQGTKLEIKRTVAAPSVFIFPPSDEQLKSGTASVVCLLNNFYPREAKVQWKVDNALQSGNSQESVTEQDSKDSTYSLSSTLTLSKADYEKHKVYACEVTHQGLSSPVTKSFNRGEC

SEQ ID NO: 472 - protein, 458 aa, Artificial Sequence
  source: /note="Description of Artificial Sequence: Synthetic polypeptide"
QMQVVQSGAEVKKPGASVKVSCKASGYTFTGYYMHWVRQAPGQGLEWMGWINPNSGGTNYAQKFQGRVTMTRDTSISTAYMELSRLRSDDTAVYYCARGGDYVWGTYRPHYYYGMDVWGQGTTVTVSSASTKGPSVFPLAPSSKSTSGGTAALGCLVKDYFPEPVTVSWNSGALTSGVHTFPAVLQSSGLYSLSSVVTVPSSSLGTQTYICNVNHKPSNTKVDKKVEPKSCDKTHTCPPCPAPELLGGPSVFLFPPKPKDTLMISRTPEVTCVVVDVSHEDPEVKFNWYVDGVEVHNAKTKPCEEQYGSTYRCVSVLTVLHQDWLNGKEYKCKVSNKALPAPIEKTISKAKGQPREPQVYTLPPSREEMTKNQVSLTCLVKGFYPSDIAVEWESNGQPENNYKTTPPVLDSDGSFFLYSKLTVDKSRWQQGNVFSCSVMHEALHNHYTQKSLSLSPGK

SEQ ID NO: 473 - protein, 451 aa, Artificial Sequence
  source: /note="Description of Artificial Sequence: Synthetic polypeptide"
QVQLVESGGGVVQPGRSLRLSCAASGFTFSNFGMHWVRQAPGKGLEWVAVIWYDGSNENYADSVKGRFTISRDNSKNTLYLHMNSLRVADTAVYYCARDGTIFGVVLGDYWGQGTLVTVSSASTKGPSVFPLAPSSKSTSGGTAALGCLVKDYFPEPVTVSWNSGALTSGVHTFPAVLQSSGLYSLSSVVTVPSSSLGTQTYICNVNHKPSNTKVDKKVEPKSCDKTHTCPPCPAPELLGGPSVFLFPPKPKDTLMISRTPEVTCVVVDVSHEDPEVKFNWYVDGVEVHNAKTKPCEEQYGSTYRCVSVLTVLHQDWLNGKEYKCKVSNKALPAPIEKTISKAKGQPREPQVYTLPPSREEMTKNQVSLTCLVKGFYPSDIAVEWESNGQPENNYKTTPPVLDSDGSFFLYSKLTVDKSRWQQGNVFSCSVMHEALHNHYTQKSLSLSPGK

SEQ ID NO: 474 - protein, 451 aa, Artificial Sequence
  source: /note="Description of Artificial Sequence: Synthetic polypeptide"
QVQLVESGGGVVQPGRSLRLSCAASGFTFSYFGMHWVRQAPGKGLEWVAVIWYDGSNKYYADSVKGRFTISRDNSKNTLYLQMNSLRAEDTAVYYCARDGTIFGVLLGDYWGQGTLVTVSSASTKGPSVFPLAPSSKSTSGGTAALGCLVKDYFPEPVTVSWNSGALTSGVHTFPAVLQSSGLYSLSSVVTVPSSSLGTQTYICNVNHKPSNTKVDKKVEPKSCDKTHTCPPCPAPELLGGPSVFLFPPKPKDTLMISRTPEVTCVVVDVSHEDPEVKFNWYVDGVEVHNAKTKPCEEQYGSTYRCVSVLTVLHQDWLNGKEYKCKVSNKALPAPIEKTISKAKGQPREPQVYTLPPSREEMTKNQVSLTCLVKGFYPSDIAVEWESNGQPENNYKTTPPVLDSDGSFFLYSKLTVDKSRWQQGNVFSCSVMHEALHNHYTQKSLSLSPGK

SEQ ID NO: 475 - protein, 450 aa, Artificial Sequence
  source: /note="Description of Artificial Sequence: Synthetic polypeptide"
QVQLVESGGGVVQPGRSLRLSCAASGFTFSSYGMHWVRQAPGKGLEWVAVIWYDGSNKYYADSVKGRFTISSDNSKNTLYLQMNSLRAEDTAVYYCARDRTIFGVVLDYWGQGTLVTVSSASTKGPSVFPLAPSSKSTSGGTAALGCLVKDYFPEPVTVSWNSGALTSGVHTFPAVLQSSGLYSLSSVVTVPSSSLGTQTYICNVNHKPSNTKVDKKVEPKSCDKTHTCPPCPAPELLGGPSVFLFPPKPKDTLMISRTPEVTCVVVDVSHEDPEVKFNWYVDGVEVHNAKTKPCEEQYGSTYRCVSVLTVLHQDWLNGKEYKCKVSNKALPAPIEKTISKAKGQPREPQVYTLPPSREEMTKNQVSLTCLVKGFYPSDIAVEWESNGQPENNYKTTPPVLDSDGSFFLYSKLTVDKSRWQQGNVFSCSVMHEALHNHYTQKSLSLSPGK

SEQ ID NO: 476 - protein, 453 aa, Artificial Sequence
  source: /note="Description of Artificial Sequence: Synthetic polypeptide"
QVPLVQSGAEVKKPGASVKVSCKASGYTFTGYYIHWVRQAPGQGLEWMGWINPDSGGTDYSQRFQGRFTMTRDTSISTAYMELNRLRSDDTAVYYCAREATIFGMVIVPFDYWGQGTLVTVSSASTKGPSVFPLAPSSKSTSGGTAALGCLVKDYFPEPVTVSWNSGALTSGVHTFPAVLQSSGLYSLSSVVTVPSSSLGTQTYICNVNHKPSNTKVDKKVEPKSCDKTHTCPPCPAPELLGGPSVFLFPPKPKDTLMISRTPEVTCVVVDVSHEDPEVKFNWYVDGVEVHNAKTKPCEEQYGSTYRCVSVLTVLHQDWLNGKEYKCKVSNKALPAPIEKTISKAKGQPREPQVYTLPPSREEMTKNQVSLTCLVKGFYPSDIAVEWESNGQPENNYKTTPPVLDSDGSFFLYSKLTVDKSRWQQGNVFSCSVMHEALHNHYTQKSLSLSPGK

SEQ ID NO: 477 - protein, 453 aa, Artificial Sequence
  source: /note="Description of Artificial Sequence: Synthetic polypeptide"
QVPLVQSGAEVKKPGASVKVSCKASGYTFTGYYIHWVRQAPGQGLEWMGWINPDSGGTDYSQRFQGRFTMTRDTSISTAYMELSRLRSDDTAVYYCAREATIFGMVIVPFDYWGQGTLVTVSSASTKGPSVFPLAPSSKSTSGGTAALGCLVKDYFPEPVTVSWNSGALTSGVHTFPAVLQSSGLYSLSSVVTVPSSSLGTQTYICNVNHKPSNTKVDKKVEPKSCDKTHTCPPCPAPELLGGPSVFLFPPKPKDTLMISRTPEVTCVVVDVSHEDPEVKFNWYVDGVEVHNAKTKPCEEQYGSTYRCVSVLTVLHQDWLNGKEYKCKVSNKALPAPIEKTISKAKGQPREPQVYTLPPSREEMTKNQVSLTCLVKGFYPSDIAVEWESNGQPENNYKTTPPVLDSDGSFFLYSKLTVDKSRWQQGNVFSCSVMHEALHNHYTQKSLSLSPGK

SEQ ID NO: 478 - protein, 453 aa, Artificial Sequence
  source: /note="Description of Artificial Sequence: Synthetic polypeptide"
QVPLVQSGAEVKKPGASVKVSCKASGYTFTGYYIHWVRQAPGQGLVWMGWISPNSGDTSYAQKFQDRVTMTRDTSISTAYMELSRLRSDDTAVYFCTREATIFGMLIVPFDYWGQGTLVTVSSASTKGPSVFPLAPSSKSTSGGTAALGCLVKDYFPEPVTVSWNSGALTSGVHTFPAVLQSSGLYSLSSVVTVPSSSLGTQTYICNVNHKPSNTKVDKKVEPKSCDKTHTCPPCPAPELLGGPSVFLFPPKPKDTLMISRTPEVTCVVVDVSHEDPEVKFNWYVDGVEVHNAKTKPCEEQYGSTYRCVSVLTVLHQDWLNGKEYKCKVSNKALPAPIEKTISKAKGQPREPQVYTLPPSREEMTKNQVSLTCLVKGFYPSDIAVEWESNGQPENNYKTTPPVLDSDGSFFLYSKLTVDKSRWQQGNVFSCSVMHEALHNHYTQKSLSLSPGK

SEQ ID NO: 479 - protein, 453 aa, Artificial Sequence
  source: /note="Description of Artificial Sequence: Synthetic polypeptide"
QVPLVQSGAEVKKPGASVKVSCKASGYTFTGYYIHWVRQAPGQGLEWMGWISPNNGDTNYAQKFQDRVTMTRDTSISTAYMELSRLRSDDTAVYYCTREATIFGMLIVPFDYWGQGTLVTVSSASTKGPSVFPLAPSSKSTSGGTAALGCLVKDYFPEPVTVSWNSGALTSGVHTFPAVLQSSGLYSLSSVVTVPSSSLGTQTYICNVNHKPSNTKVDKKVEPKSCDKTHTCPPCPAPELLGGPSVFLFPPKPKDTLMISRTPEVTCVVVDVSHEDPEVKFNWYVDGVEVHNAKTKPCEEQYGSTYRCVSVLTVLHQDWLNGKEYKCKVSNKALPAPIEKTISKAKGQPREPQVYTLPPSREEMTKNQVSLTCLVKGFYPSDIAVEWESNGQPENNYKTTPPVLDSDGSFFLYSKLTVDKSRWQQGNVFSCSVMHEALHNHYTQKSLSLSPGK

SEQ ID NO: 480 - protein, 456 aa, Artificial Sequence
  source: /note="Description of Artificial Sequence: Synthetic polypeptide"
QVQLQESGPGLVKPSQTLSLTCTVSGDSISSGGYYWSWIRQHPGKGLEWIGYIYYSGSTYYNPSLKSRVTISVDTSKNQFSLKLSSVTAADTAVYYCARDRITIFGVVMGGGMDVWGQGTTVTVSSASTKGPSVFPLAPSSKSTSGGTAALGCLVKDYFPEPVTVSWNSGALTSGVHTFPAVLQSSGLYSLSSVVTVPSSSLGTQTYICNVNHKPSNTKVDKKVEPKSCDKTHTCPPCPAPELLGGPSVFLFPPKPKDTLMISRTPEVTCVVVDVSHEDPEVKFNWYVDGVEVHNAKTKPCEEQYGSTYRCVSVLTVLHQDWLNGKEYKCKVSNKALPAPIEKTISKAKGQPREPQVYTLPPSREEMTKNQVSLTCLVKGFYPSDIAVEWESNGQPENNYKTTPPVLDSDGSFFLYSKLTVDKSRWQQGNVFSCSVMHEALHNHYTQKSLSLSPGK

SEQ ID NO: 481 - protein, 450 aa, Artificial Sequence
  source: /note="Description of Artificial Sequence: Synthetic polypeptide"
QVQLVESGGGVVQPGRSLRLSCAASGFTFSNYGMHWVRQAPGEGLEWVAAIWFDGSDKYYADSVKGRFTISRDNSKNTLYLQMNSLRAEDTAVYYCARDQAIFGVVPDYWGQGTLVTVSSASTKGPSVFPLAPSSKSTSGGTAALGCLVKDYFPEPVTVSWNSGALTSGVHTFPAVLQSSGLYSLSSVVTVPSSSLGTQTYICNVNHKPSNTKVDKKVEPKSCDKTHTCPPCPAPELLGGPSVFLFPPKPKDTLMISRTPEVTCVVVDVSHEDPEVKFNWYVDGVEVHNAKTKPCEEQYGSTYRCVSVLTVLHQDWLNGKEYKCKVSNKALPAPIEKTISKAKGQPREPQVYTLPPSREEMTKNQVSLTCLVKGFYPSDIAVEWESNGQPENNYKTTPPVLDSDGSFFLYSKLTVDKSRWQQGNVFSCSVMHEALHNHYTQKSLSLSPGK

SEQ ID NO: 482 - protein, 451 aa, Artificial Sequence; identical to SEQ ID NO: 474
  source: /note="Description of Artificial Sequence: Synthetic polypeptide"

SEQ ID NO: 483 - protein, 450 aa, Artificial Sequence
  source: /note="Description of Artificial Sequence: Synthetic polypeptide"
QVQLVESGGGVVQPGRSLRLSCAASGFSFSSYGMHWVRQPPGKGLEWVAAIWYDGNNKYYADSVKGRFTISRDSSKNTLYLQMNSLRAEDTAVYYCARDRTIFGVVLEYLGQGTLVTVSSASTKGPSVFPLAPSSKSTSGGTAALGCLVKDYFPEPVTVSWNSGALTSGVHTFPAVLQSSGLYSLSSVVTVPSSSLGTQTYICNVNHKPSNTKVDKKVEPKSCDKTHTCPPCPAPELLGGPSVFLFPPKPKDTLMISRTPEVTCVVVDVSHEDPEVKFNWYVDGVEVHNAKTKPCEEQYGSTYRCVSVLTVLHQDWLNGKEYKCKVSNKALPAPIEKTISKAKGQPREPQVYTLPPSREEMTKNQVSLTCLVKGFYPSDIAVEWESNGQPENNYKTTPPVLDSDGSFFLYSKLTVDKSRWQQGNVFSCSVMHEALHNHYTQKSLSLSPGK

SEQ ID NO: 484 - protein, 447 aa, Artificial Sequence
  source: /note="Description of Artificial Sequence: Synthetic polypeptide"
QVQLQESGPGLVKPSETLSLTCTVSQGSISSYYWSWIRQPAGKGLEWIGRIYTSGSTNYNPSLKSRVTMSIDTSKNQFSLKLNSVTAADTAVYYCARDVAVAGFDYWGQGTLVTVSSASTKGPSVFPLAPSSKSTSGGTAALGCLVKDYFPEPVTVSWNSGALTSGVHTFPAVLQSSGLYSLSSVVTVPSSSLGTQTYICNVNHKPSNTKVDKKVEPKSCDKTHTCPPCPAPELLGGPSVFLFPPKPKDTLMISRTPEVTCVVVDVSHEDPEVKFNWYVDGVEVHNAKTKPCEEQYGSTYRCVSVLTVLHQDWLNGKEYKCKVSNKALPAPIEKTISKAKGQPREPQVYTLPPSREEMTKNQVSLTCLVKGFYPSDIAVEWESNGQPENNYKTTPPVLDSDGSFFLYSKLTVDKSRWQQGNVFSCSVMHEALHNHYTQKSLSLSPGK

SEQ ID NO: 485 - protein, 447 aa, Artificial Sequence
  source: /note="Description of Artificial Sequence: Synthetic polypeptide"
QVQLQESGPGLVKPSETLSLTCTVSGGSISSYYWSWIRQPAGKGLEWIGRIYTSGSTNYNPSLKSRVTMSIDTSKNQFSLKLNSVTAADTAVYYCARDVAVAGFDYWGQGTLVTVSSASTKGPSVFPLAPSSKSTSGGTAALGCLVKDYFPEPVTVSWNSGALTSGVHTFPAVLQSSGLYSLSSVVTVPSSSLGTQTYICNVNHKPSNTKVDKKVEPKSCDKTHTCPPCPAPELLGGPSVFLFPPKPKDTLMISRTPEVTCVVVDVSHEDPEVKFNWYVDGVEVHNAKTKPCEEQYGSTYRCVSVLTVLHQDWLNGKEYKCKVSNKALPAPIEKTISKAKGQPREPQVYTLPPSREEMTKNQVSLTCLVKGFYPSDIAVEWESNGQPENNYKTTPPVLDSDGSFFLYSKLTVDKSRWQQGNVFSCSVMHEALHNHYTQKSLSLSPGK

SEQ ID NO: 486 - protein, 451 aa, Artificial Sequence
  source: /note="Description of Artificial Sequence: Synthetic polypeptide"
QVQLVESGGGVVQPGRSLRLSCAASGFTFSYFGMHWVRQAPGKGLEWVAVIWYDASNKYYADAVKGRFTISRDNSKNTLYLQMNSLRAEDTAVYYCARDGTIFGVLLGDYWGQGTLVTVSSASTKGPSVFPLAPSSKSTSGGTAALGCLVKDYFPEPVTVSWNSGALTSGVHTFPAVLQSSGLYSLSSVVTVPSSSLGTQTYICNVNHKPSNTKVDKKVEPKSCDKTHTCPPCPAPELLGGPSVFLFPPKPKDTLMISRTPEVTCVVVDVSHEDPEVKFNWYVDGVEVHNAKTKPCEEQYGSTYRCVSVLTVLHQDWLNGKEYKCKVSNKALPAPIEKTISKAKGQPREPQVYTLPPSREEMTKNQVSLTCLVKGFYPSDIAVEWESNGQPENNYKTTPPVLDSDGSFFLYSKLTVDKSRWQQGNVFSCSVMHEALHNHYTQKSLSLSPGK

SEQ ID NO: 487 - protein, 451 aa, Artificial Sequence
  source: /note="Description of Artificial Sequence: Synthetic polypeptide"
QVQLVESGGGVVQPGRSLRLSCAASGFTFSYFGMHWVRQAPGKGLEWVAVIWYDASNKYYADSVKGRFTISRDNSKNTLYLQMNSLRAEDTAVYYCARDGTIFGVLLGDYWGQGTLVTVSSASTKGPSVFPLAPSSKSTSGGTAALGCLVKDYFPEPVTVSWNSGALTSGVHTFPAVLQSSGLYSLSSVVTVPSSSLGTQTYICNVNHKPSNTKVDKKVEPKSCDKTHTCPPCPAPELLGGPSVFLFPPKPKDTLMISRTPEVTCVVVDVSHEDPEVKFNWYVDGVEVHNAKTKPCEEQYGSTYRCVSVLTVLHQDWLNGKEYKCKVSNKALPAPIEKTISKAKGQPREPQVYTLPPSREEMTKNQVSLTCLVKGFYPSDIAVEWESNGQPENNYKTTPPVLDSDGSFFLYSKLTVDKSRWQQGNVFSCSVMHEALHNHYTQKSLSLSPGK

SEQ ID NO: 488 - protein, 451 aa, Artificial Sequence
  source: /note="Description of Artificial Sequence: Synthetic polypeptide"
QVQLVESGGGVVQPGRSLRLSCAASGFTFSYFGMHWVRQAPGKGLEWVAVIWYDGSNKYYADAVKGRFTISRDNSKNTLYLQMNSLRAEDTAVYYCARDGTIFGVLLGDYWGQGTLVTVSSASTKGPSVFPLAPSSKSTSGGTAALGCLVKDYFPEPVTVSWNSGALTSGVHTFPAVLQSSGLYSLSSVVTVPSSSLGTQTYICNVNHKPSNTKVDKKVEPKSCDKTHTCPPCPAPELLGGPSVFLFPPKPKDTLMISRTPEVTCVVVDVSHEDPEVKFNWYVDGVEVHNAKTKPCEEQYGSTYRCVSVLTVLHQDWLNGKEYKCKVSNKALPAPIEKTISKAKGQPREPQVYTLPPSREEMTKNQVSLTCLVKGFYPSDIAVEWESNGQPENNYKTTPPVLDSDGSFFLYSKLTVDKSRWQQGNVFSCSVMHEALHNHYTQKSLSLSPGK

SEQ ID NO: 489 - protein, 451 aa, Artificial Sequence; identical to SEQ ID NO: 486
  source: /note="Description of Artificial Sequence: Synthetic polypeptide"

SEQ ID NO: 490 - protein, 451 aa, Artificial Sequence; identical to SEQ ID NO: 486
  source: /note="Description of Artificial Sequence: Synthetic polypeptide"

SEQ ID NO: 491 - protein, 451 aa, Artificial Sequence
  source: /note="Description of Artificial Sequence: Synthetic polypeptide"
QVQLVESGGGVVQPGRSLRLSCAASGFTFSYFGMHWVRQAPGKGLEWVAVIWYDASNKYYADAVKGRFTISRDNSKNTLYLQMNSLRAEDTAVYYCARDRTIFGVLLGDYWGQGTLVTVSSASTKGPSVFPLAPSSKSTSGGTAALGCLVKDYFPEPVTVSWNSGALTSGVHTFPAVLQSSGLYSLSSVVTVPSSSLGTQTYICNVNHKPSNTKVDKKVEPKSCDKTHTCPPCPAPELLGGPSVFLFPPKPKDTLMISRTPEVTCVVVDVSHEDPEVKFNWYVDGVEVHNAKTKPCEEQYGSTYRCVSVLTVLHQDWLNGKEYKCKVSNKALPAPIEKTISKAKGQPREPQVYTLPPSREEMTKNQVSLTCLVKGFYPSDIAVEWESNGQPENNYKTTPPVLDSDGSFFLYSKLTVDKSRWQQGNVFSCSVMHEALHNHYTQKSLSLSPGK

SEQ ID NO: 492 - protein, 451 aa, Artificial Sequence
  source: /note="Description of Artificial Sequence: Synthetic polypeptide"
QVQLVESGGGVVQPGRSLRLSCAASGFTFSNFGMHWVRQAPGKGLEWVAVIWYDASNENYADAVKGRFTISRDNSKNTLYLQMNSLRVADTAVYYCARDGTIFGVVLGDYWGQGTLVTVSSASTKGPSVFPLAPSSKSTSGGTAALGCLVKDYFPEPVTVSWNSGALTSGVHTFPAVLQSSGLYSLSSVVTVPSSSLGTQTYICNVNHKPSNTKVDKKVEPKSCDKTHTCPPCPAPELLGGPSVFLFPPKPKDTLMISRTPEVTCVVVDVSHEDPEVKFNWYVDGVEVHNAKTKPCEEQYGSTYRCVSVLTVLHQDWLNGKEYKCKVSNKALPAPIEKTISKAKGQPREPQVYTLPPSREEMTKNQVSLTCLVKGFYPSDIAVEWESNGQPENNYKTTPPVLDSDGSFFLYSKLTVDKSRWQQGNVFSCSVMHEALHNHYTQKSLSLSPGK

SEQ ID NO: 493 - protein, 451 aa, Artificial Sequence; identical to SEQ ID NO: 492
  source: /note="Description of Artificial Sequence: Synthetic polypeptide"

SEQ ID NO: 494 - protein, 451 aa, Artificial Sequence; identical to SEQ ID NO: 492
  source: /note="Description of Artificial Sequence: Synthetic polypeptide"

SEQ ID NO: 495 - protein, 451 aa, Artificial Sequence
  source: /note="Description of Artificial Sequence: Synthetic polypeptide"
QVQLVESGGGVVQPGRSLRLSCAASGFTFSNFGMHWVRQAPGKGLEWVAVIWYDASNENYADSVKGRFTISRDNSKNTLYLHMNSLRVADTAVYYCARDGTIFGVVLGDYWGQGTLVTVSSASTKGPSVFPLAPSSKSTSGGTAALGCLVKDYFPEPVTVSWNSGALTSGVHTFPAVLQSSGLYSLSSVVTVPSSSLGTQTYICNVNHKPSNTKVDKKVEPKSCDKTHTCPPCPAPELLGGPSVFLFPPKPKDTLMISRTPEVTCVVVDVSHEDPEVKFNWYVDGVEVHNAKTKPCEEQYGSTYRCVSVLTVLHQDWLNGKEYKCKVSNKALPAPIEKTISKAKGQPREPQVYTLPPSREEMTKNQVSLTCLVKGFYPSDIAVEWESNGQPENNYKTTPPVLDSDGSFFLYSKLTVDKSRWQQGNVFSCSVMHEALHNHYTQKSLSLSPGK

SEQ ID NO: 496 - protein, 451 aa, Artificial Sequence
  source: /note="Description of Artificial Sequence: Synthetic polypeptide"
QVQLVESGGGVVQPGRSLRLSCAASGFTFSNFGMHWVRQAPGKGLEWVAVIWYDGSNENYADAVKGRFTISRDNSKNTLYLHMNSLRVADTAVYYCARDGTIFGVVLGDYWGQGTLVTVSSASTKGPSVFPLAPSSKSTSGGTAALGCLVKDYFPEPVTVSWNSGALTSGVHTFPAVLQSSGLYSLSSVVTVPSSSLGTQTYICNVNHKPSNTKVDKKVEPKSCDKTHTCPPCPAPELLGGPSVFLFPPKPKDTLMISRTPEVTCVVVDVSHEDPEVKFNWYVDGVEVHNAKTKPCEEQYGSTYRCVSVLTVLHQDWLNGKEYKCKVSNKALPAPIEKTISKAKGQPREPQVYTLPPSREEMTKNQVSLTCLVKGFYPSDIAVEWESNGQPENNYKTTPPVLDSDGSFFLYSKLTVDKSRWQQGNVFSCSVMHEALHNHYTQKSLSLSPGK

SEQ ID NO: 497 - protein, 451 aa, Artificial Sequence
  source: /note="Description of Artificial Sequence: Synthetic polypeptide"
QVQLVESGGGVVQPGRSLRLSCAASGFTFSNFGMHWVRQAPGKGLEWVAVIWYDASNENYADAVKGRFTISRDNSKNTLYLQMNSLRVEDTAVYYCARDRTIFGVVLGDYWGQGTLVTVSSASTKGPSVFPLAPSSKSTSGGTAALGCLVKDYFPEPVTVSWNSGALTSGVHTFPAVLQSSGLYSLSSVVTVPSSSLGTQTYICNVNHKPSNTKVDKKVEPKSCDKTHTCPPCPAPELLGGPSVFLFPPKPKDTLMISRTPEVTCVVVDVSHEDPEVKFNWYVDGVEVHNAKTKPCEEQYGSTYRCVSVLTVLHQDWLNGKEYKCKVSNKALPAPIEKTISKAKGQPREPQVYTLPPSREEMTKNQVSLTCLVKGFYPSDIAVEWESNGQPENNYKTTPPVLDSDGSFFLYSKLTVDKSRWQQGNVFSCSVMHEALHNHYTQKSLSLSPGK

SEQ ID NO: 498 - protein, 451 aa, Artificial Sequence
  source: /note="Description of Artificial Sequence: Synthetic polypeptide"
QVQLVESGGGVVQPGRSLRLSCAASGFTFSNFGMHWVRQAPGKGLEWVAVIWYDASNENYADAVKGRFTISRDNSKNTLYLQMNSLRVEDTAVYYCARDGTIFGVVLGDYWGQGTLVTVSSASTKGPSVFPLAPSSKSTSGGTAALGCLVKDYFPEPVTVSWNSGALTSGVHTFPAVLQSSGLYSLSSVVTVPSSSLGTQTYICNVNHKPSNTKVDKKVEPKSCDKTHTCPPCPAPELLGGPSVFLFPPKPKDTLMISRTPEVTCVVVDVSHEDPEVKFNWYVDGVEVHNAKTKPCEEQYGSTYRCVSVLTVLHQDWLNGKEYKCKVSNKALPAPIEKTISKAKGQPREPQVYTLPPSREEMTKNQVSLTCLVKGFYPSDIAVEWESNGQPENNYKTTPPVLDSDGSFFLYSKLTVDKSRWQQGNVFSCSVMHEALHNHYTQKSLSLSPGK

SEQ ID NO: 499 - protein, 451 aa, Artificial Sequence
  source: /note="Description of Artificial Sequence: Synthetic polypeptide"
QVQLVESGGGVVQPGRSLRLSCAASGFTFSNFGMHWVRQAPGKGLEWVAVIWYDGSNENYADSVKGRFTISRDNSKNTLYLHMNSLRAADTAVYYCARDGTIFGVVLGDYWGQGTLVTVSSASTKGPSVFPLAPSSKSTSGGTAALGCLVKDYFPEPVTVSWNSGALTSGVHTFPAVLQSSGLYSLSSVVTVPSSSLGTQTYICNVNHKPSNTKVDKKVEPKSCDKTHTCPPCPAPELLGGPSVFLFPPKPKDTLMISRTPEVTCVVVDVSHEDPEVKFNWYVDGVEVHNAKTKPCEEQYGSTYRCVSVLTVLHQDWLNGKEYKCKVSNKALPAPIEKTISKAKGQPREPQVYTLPPSREEMTKNQVSLTCLVKGFYPSDIAVEWESNGQPENNYKTTPPVLDSDGSFFLYSKLTVDKSRWQQGNVFSCSVMHEALHNHYTQKSLSLSPGK

SEQ ID NO: 500 - protein, 451 aa, Artificial Sequence
  source: /note="Description of Artificial Sequence: Synthetic polypeptide"
QVQLVESGGGVVQPGRSLRLSCAASGFTFSNFGMHWVRQAPGKGLEWVAVIWYDASNENYADAVKGRFTISRDNSKNTLYLQMNSLRAADTAVYYCARDGTIFGVVLGDYWGQGTLVTVSSASTKGPSVFPLAPSSKSTSGGTAALGCLVKDYFPEPVTVSWNSGALTSGVHTFPAVLQSSGLYSLSSVVTVPSSSLGTQTYICNVNHKPSNTKVDKKVEPKSCDKTHTCPPCPAPELLGGPSVFLFPPKPKDTLMISRTPEVTCVVVDVSHEDPEVKFNWYVDGVEVHNAKTKPCEEQYGSTYRCVSVLTVLHQDWLNGKEYKCKVSNKALPAPIEKTISKAKGQPREPQVYTLPPSREEMTKNQVSLTCLVKGFYPSDIAVEWESNGQPENNYKTTPPVLDSDGSFFLYSKLTVDKSRWQQGNVFSCSVMHEALHNHYTQKSLSLSPGK

SEQ ID NO: 501 - protein, 451 aa, Artificial Sequence
  source: /note="Description of Artificial Sequence: Synthetic polypeptide"
QVQLVESGGGVVQPGRSLRLSCAASGFTFSNFGMHWVRQAPGKGLEWVAVIWYDASNENYADAVKGRFTISRDNSKNTLYLHMNSLRAADTAVYYCARDGTIFGVVLGDYWGQGTLVTVSSASTKGPSVFPLAPSSKSTSGGTAALGCLVKDYFPEPVTVSWNSGALTSGVHTFPAVLQSSGLYSLSSVVTVPSSSLGTQTYICNVNHKPSNTKVDKKVEPKSCDKTHTCPPCPAPELLGGPSVFLFPPKPKDTLMISRTPEVTCVVVDVSHEDPEVKFNWYVDGVEVHNAKTKPCEEQYGSTYRCVSVLTVLHQDWLNGKEYKCKVSNKALPAPIEKTISKAKGQPREPQVYTLPPSREEMTKNQVSLTCLVKGFYPSDIAVEWESNGQPENNYKTTPPVLDSDGSFFLYSKLTVDKSRWQQGNVFSCSVMHEALHNHYTQKSLSLSPGK

SEQ ID NO: 502 - protein, 451 aa, Artificial Sequence; identical to SEQ ID NO: 500
  source: /note="Description of Artificial Sequence: Synthetic polypeptide"

SEQ ID NO: 503 - protein, 451 aa, Artificial Sequence; identical to SEQ ID NO: 500
  source: /note="Description of Artificial Sequence: Synthetic polypeptide"

SEQ ID NO: 504 - protein, 451 aa, Artificial Sequence; identical to SEQ ID NO: 501
  source: /note="Description of Artificial Sequence: Synthetic polypeptide"

SEQ ID NO: 505 - protein, 451 aa, Artificial Sequence; identical to SEQ ID NO: 501
  source: /note="Description of Artificial Sequence: Synthetic polypeptide"

SEQ ID NO: 506 - protein, 451 aa, Artificial Sequence; identical to SEQ ID NO: 500
  source: /note="Description of Artificial Sequence: Synthetic polypeptide"

SEQ ID NO: 507 - protein, 451 aa, Artificial Sequence
  source: /note="Description of Artificial Sequence: Synthetic polypeptide"
QVQLVESGGGVVQPGRSLRLSCAASGFTFSNFGMHWVRQAPGKGLEWVAVIWYDGSNENYADAVKGRFTISRDNSKNTLYLQMNSLRAADTAVYYCARDGTIFGVVLGDYWGQGTLVTVSSASTKGPSVFPLAPSSKSTSGGTAALGCLVKDYFPEPVTVSWNSGALTSGVHTFPAVLQSSGLYSLSSVVTVPSSSLGTQTYICNVNHKPSNTKVDKKVEPKSCDKTHTCPPCPAPELLGGPSVFLFPPKPKDTLMISRTPEVTCVVVDVSHEDPEVKFNWYVDGVEVHNAKTKPCEEQYGSTYRCVSVLTVLHQDWLNGKEYKCKVSNKALPAPIEKTISKAKGQPREPQVYTLPPSREEMTKNQVSLTCLVKGFYPSDIAVEWESNGQPENNYKTTPPVLDSDGSFFLYSKLTVDKSRWQQGNVFSCSVMHEALHNHYTQKSLSLSPGK

SEQ ID NO: 508 - protein, 451 aa, Artificial Sequence
  source: /note="Description of Artificial Sequence: Synthetic polypeptide"
QVQLVESGGGVVQPGRSLRLSCAASGFTFSNFGMHWVRQAPGKGLEWVAVIWYDASNENYADSVKGRFTISRDNSKNTLYLQMNSLRAADTAVYYCARDGTIFGVVLGDYWGQGTLVTVSSASTKGPSVFPLAPSSKSTSGGTAALGCLVKDYFPEPVTVSWNSGALTSGVHTFPAVLQSSGLYSLSSVVTVPSSSLGTQTYICNVNHKPSNTKVDKKVEPKSCDKTHTCPPCPAPELLGGPSVFLFPPKPKDTLMISRTPEVTCVVVDVSHEDPEVKFNWYVDGVEVHNAKTKPCEEQYGSTYRCVSVLTVLHQDWLNGKEYKCKVSNKALPAPIEKTISKAKGQPREPQVYTLPPSREEMTKNQVSLTCLVKGFYPSDIAVEWESNGQPENNYKTTPPVLDSDGSFFLYSKLTVDKSRWQQGNVFSCSVMHEALHNHYTQKSLSLSPGK

SEQ ID NO: 509 - protein, 451 aa, Artificial Sequence
  source: /note="Description of Artificial Sequence: Synthetic polypeptide"
QVQLVESGGGVVQPGRSLRLSCAASGFTFSNFGMHWVRQAPGKGLEWVAVIWYDASNENYADAVKGRFTISRDNSKNTLYLQMNSLRAEDTAVYYCARDRTIFGVVLGDYWGQGTLVTVSSASTKGPSVFPLAPSSKSTSGGTAALGCLVKDYFPEPVTVSWNSGALTSGVHTFPAVLQSSGLYSLSSVVTVPSSSLGTQTYICNVNHKPSNTKVDKKVEPKSCDKTHTCPPCPAPELLGGPSVFLFPPKPKDTLMISRTPEVTCVVVDVSHEDPEVKFNWYVDGVEVHNAKTKPCEEQYGSTYRCVSVLTVLHQDWLNGKEYKCKVSNKALPAPIEKTISKAKGQPREPQVYTLPPSREEMTKNQVSLTCLVKGFYPSDIAVEWESNGQPENNYKTTPPVLDSDGSFFLYSKLTVDKSRWQQGNVFSCSVMHEALHNHYTQKSLSLSPGK

SEQ ID NO: 510 - protein, 451 aa, Artificial Sequence
  source: /note="Description of Artificial Sequence: Synthetic polypeptide"
QVQLVESGGGVVQPGRSLRLSCAASGFTFSNFGMHWVRQAPGKGLEWVAVIWYDASNENYADAVKGRFTISRDNSKNTLYLQMNSLRAEDTAVYYCARDGTIFGVVLGDYWGQGTLVTVSSASTKGPSVFPLAPSSKSTSGGTAALGCLVKDYFPEPVTVSWNSGALTSGVHTFPAVLQSSGLYSLSSVVTVPSSSLGTQTYICNVNHKPSNTKVDKKVEPKSCDKTHTCPPCPAPELLGGPSVFLFPPKPKDTLMISRTPEVTCVVVDVSHEDPEVKFNWYVDGVEVHNAKTKPCEEQYGSTYRCVSVLTVLHQDWLNGKEYKCKVSNKALPAPIEKTISKAKGQPREPQVYTLPPSREEMTKNQVSLTCLVKGFYPSDIAVEWESNGQPENNYKTTPPVLDSDGSFFLYSKLTVDKSRWQQGNVFSCSVMHEALHNHYTQKSLSLSPGK

SEQ ID NO: 511 - protein, 450 aa, Artificial Sequence
  source: /note="Description of Artificial Sequence: Synthetic polypeptide"
QVQLVESGGGVVQPGRSLRLSCAASGFTFSSYGMHWVRQAPGKGLEWVAVIWYDASNKYYADAVKGRFTISRDNSKNTLYLQMNSLRAEDTAVYYCARDRTIFGVVLDYWGQGTLVTVSSASTKGPSVFPLAPSSKSTSGGTAALGCLVKDYFPEPVTVSWNSGALTSGVHTFPAVLQSSGLYSLSSVVTVPSSSLGTQTYICNVNHKPSNTKVDKKVEPKSCDKTHTCPPCPAPELLGGPSVFLFPPKPKDTLMISRTPEVTCVVVDVSHEDPEVKFNWYVDGVEVHNAKTKPCEEQYGSTYRCVSVLTVLHQDWLNGKEYKCKVSNKALPAPIEKTISKAKGQPREPQVYTLPPSREEMTKNQVSLTCLVKGFYPSDIAVEWESNGQPENNYKTTPPVLDSDGSFFLYSKLTVDKSRWQQGNVFSCSVMHEALHNHYTQKSLSLSPGK

SEQ ID NO: 512 - protein, 450 aa, Artificial Sequence
  source: /note="Description of Artificial Sequence: Synthetic polypeptide"
QVQLVESGGGVVQPGRSLRLSCAASGFTFSSYGMHWVRQAPGKGLEWVAVIWYDASNKYYADAVKGRFTISSDNSKNTLYLQMNSLRAEDTAVYYCARDRTIFGVVLDYWGQGTLVTVSSASTKGPSVFPLAPSSKSTSGGTAALGCLVKDYFPEPVTVSWNSGALTSGVHTFPAVLQSSGLYSLSSVVTVPSSSLGTQTYICNVNHKPSNTKVDKKVEPKSCDKTHTCPPCPAPELLGGPSVFLFPPKPKDTLMISRTPEVTCVVVDVSHEDPEVKFNWYVDGVEVHNAKTKPCEEQYGSTYRCVSVLTVLHQDWLNGKEYKCKVSNKALPAPIEKTISKAKGQPREPQVYTLPPSREEMTKNQVSLTCLVKGFYPSDIAVEWESNGQPENNYKTTPPVLDSDGSFFLYSKLTVDKSRWQQGNVFSCSVMHEALHNHYTQKSLSLSPGK

SEQ ID NO: 513 - protein, 450 aa, Artificial Sequence; identical to SEQ ID NO: 511
  source: /note="Description of Artificial Sequence: Synthetic polypeptide"

SEQ ID NO: 514 - protein, 450 aa, Artificial Sequence; identical to SEQ ID NO: 511
  source: /note="Description of Artificial Sequence: Synthetic polypeptide"

SEQ ID NO: 515 - protein, 450 aa, Artificial Sequence; identical to SEQ ID NO: 512
  source: /note="Description of Artificial Sequence: Synthetic polypeptide"

SEQ ID NO: 516 - protein, 450 aa, Artificial Sequence; identical to SEQ ID NO: 512
  source: /note="Description of Artificial Sequence: Synthetic polypeptide"

SEQ ID NO: 517 - protein, 450 aa, Artificial Sequence; identical to SEQ ID NO: 511
  source: /note="Description of Artificial Sequence: Synthetic polypeptide"

SEQ ID NO: 518 - protein, 450 aa, Artificial Sequence
  source: /note="Description of Artificial Sequence: Synthetic polypeptide"
QVQLVESGGGVVQPGRSLRLSCAASGFTFSSYGMHWVRQAPGKGLEWVAVIWYDASNKYYADSVKGRFTISRDNSKNTLYLQMNSLRAEDTAVYYCARDRTIFGVVLDYWGQGTLVTVSSASTKGPSVFPLAPSSKSTSGGTAALGCLVKDYFPEPVTVSWNSGALTSGVHTFPAVLQSSGLYSLSSVVTVPSSSLGTQTYICNVNHKPSNTKVDKKVEPKSCDKTHTCPPCPAPELLGGPSVFLFPPKPKDTLMISRTPEVTCVVVDVSHEDPEVKFNWYVDGVEVHNAKTKPCEEQYGSTYRCVSVLTVLHQDWLNGKEYKCKVSNKALPAPIEKTISKAKGQPREPQVYTLPPSREEMTKNQVSLTCLVKGFYPSDIAVEWESNGQPENNYKTTPPVLDSDGSFFLYSKLTVDKSRWQQGNVFSCSVMHEALHNHYTQKSLSLSPGK

SEQ ID NO: 519 - protein, 450 aa, Artificial Sequence
  source: /note="Description of Artificial Sequence: Synthetic polypeptide"
QVQLVESGGGVVQPGRSLRLSCAASGFTFSSYGMHWVRQAPGKGLEWVAVIWYDGSNKYYADAVKGRFTISRDNSKNTLYLQMNSLRAEDTAVYYCARDRTIFGVVLDYWGQGTLVTVSSASTKGPSVFPLAPSSKSTSGGTAALGCLVKDYFPEPVTVSWNSGALTSGVHTFPAVLQSSGLYSLSSVVTVPSSSLGTQTYICNVNHKPSNTKVDKKVEPKSCDKTHTCPPCPAPELLGGPSVFLFPPKPKDTLMISRTPEVTCVVVDVSHEDPEVKFNWYVDGVEVHNAKTKPCEEQYGSTYRCVSVLTVLHQDWLNGKEYKCKVSNKALPAPIEKTISKAKGQPREPQVYTLPPSREEMTKNQVSLTCLVKGFYPSDIAVEWESNGQPENNYKTTPPVLDSDGSFFLYSKLTVDKSRWQQGNVFSCSVMHEALHNHYTQKSLSLSPGK

SEQ ID NO: 520 - protein, 451 aa, Artificial Sequence; identical to SEQ ID NO: 486
  source: /note="Description of Artificial Sequence: Synthetic polypeptide"

SEQ ID NO: 521 - protein, 451 aa, Artificial Sequence; identical to SEQ ID NO: 491
  source: /note="Description of Artificial Sequence: Synthetic polypeptide"

SEQ ID NO: 522 - protein, 451 aa, Artificial Sequence; identical to SEQ ID NO: 486
  source: /note="Description of Artificial Sequence: Synthetic polypeptide"

SEQ ID NO: 523 - protein, 451 aa, Artificial Sequence; identical to SEQ ID NO: 491
  source: /note="Description of Artificial Sequence: Synthetic polypeptide"

SEQ ID NO: 524 - protein, 451 aa, Artificial Sequence; identical to SEQ ID NO: 474
  source: /note="Description of Artificial Sequence: Synthetic polypeptide"

SEQ ID NO: 525 - protein, 451 aa, Artificial Sequence; identical to SEQ ID NO: 487
  source: /note="Description of Artificial Sequence: Synthetic polypeptide"

SEQ ID NO: 526 - protein, 451 aa, Artificial Sequence; identical to SEQ ID NO: 488
  source: /note="Description of Artificial Sequence: Synthetic polypeptide"

SEQ ID NO: 527 - protein, 450 aa, Artificial Sequence
  source: /note="Description of Artificial Sequence: Synthetic polypeptide"
QVQLVESGGGVVQPGRSLRLSCAASGFSFSSYGMHWVRQPPGKGLEWVAAIWYDANNKYYADAVKGRFTISRDSSKNTLYLQMNSLRAEDTAVYYCARDRTIFGVVLEYWGQGTLVTVSSASTKGPSVFPLAPSSKSTSGGTAALGCLVKDYFPEPVTVSWNSGALTSGVHTFPAVLQSSGLYSLSSVVTVPSSSLGTQTYICNVNHKPSNTKVDKKVEPKSCDKTHTCPPCPAPELLGGPSVFLFPPKPKDTLMISRTPEVTCVVVDVSHEDPEVKFNWYVDGVEVHNAKTKPCEEQYGSTYRCVSVLTVLHQDWLNGKEYKCKVSNKALPAPIEKTISKAKGQPREPQVYTLPPSREEMTKNQVSLTCLVKGFYPSDIAVEWESNGQPENNYKTTPPVLDSDGSFFLYSKLTVDKSRWQQGNVFSCSVMHEALHNHYTQKSLSLSPGK

SEQ ID NO: 528 - protein, 450 aa, Artificial Sequence; identical to SEQ ID NO: 527
  source: /note="Description of Artificial Sequence: Synthetic polypeptide"

SEQ ID NO: 529 - protein, 450 aa, Artificial Sequence
  source: /note="Description of Artificial Sequence: Synthetic polypeptide"
QVQLVESGGGVVQPGRSLRLSCAASGFSFSSYGMHWVRQPPGKGLEWVAAIWYDANNKYYADAVKGRFTISRDSSKNTLYLQMNSLRAEDTAVYYCARDRTIFGVVLEYLGQGTLVTVSSASTKGPSVFPLAPSSKSTSGGTAALGCLVKDYFPEPVTVSWNSGALTSGVHTFPAVLQSSGLYSLSSVVTVPSSSLGTQTYICNVNHKPSNTKVDKKVEPKSCDKTHTCPPCPAPELLGGPSVFLFPPKPKDTLMISRTPEVTCVVVDVSHEDPEVKFNWYVDGVEVHNAKTKPCEEQYGSTYRCVSVLTVLHQDWLNGKEYKCKVSNKALPAPIEKTISKAKGQPREPQVYTLPPSREEMTKNQVSLTCLVKGFYPSDIAVEWESNGQPENNYKTTPPVLDSDGSFFLYSKLTVDKSRWQQGNVFSCSVMHEALHNHYTQKSLSLSPGK

SEQ ID NO: 530 - protein, 450 aa, Artificial Sequence; identical to SEQ ID NO: 527
  source: /note="Description of Artificial Sequence: Synthetic polypeptide"

SEQ ID NO: 531 - protein, 450 aa, Artificial Sequence; identical to SEQ ID NO: 529
  source: /note="Description of Artificial Sequence: Synthetic polypeptide"

SEQ ID NO: 532 - protein, 450 aa, Artificial Sequence; identical to SEQ ID NO: 529
  source: /note="Description of Artificial Sequence: Synthetic polypeptide"

SEQ ID NO: 533 - protein, 450 aa, Artificial Sequence; identical to SEQ ID NO: 527
  source: /note="Description of Artificial Sequence: Synthetic polypeptide"

SEQ ID NO: 534 - protein, 450 aa, Artificial Sequence
  source: /note="Description of Artificial Sequence: Synthetic polypeptide"
QVQLVESGGGVVQPGRSLRLSCAASGFSFSSYGMHWVRQPPGKGLEWVAAIWYDGNNKYYADAVKGRFTISRDSSKNTLYLQMNSLRAEDTAVYYCARDRTIFGVVLEYWGQGTLVTVSSASTKGPSVFPLAPSSKSTSGGTAALGCLVKDYFPEPVTVSWNSGALTSGVHTFPAVLQSSGLYSLSSVVTVPSSSLGTQTYICNVNHKPSNTKVDKKVEPKSCDKTHTCPPCPAPELLGGPSVFLFPPKPKDTLMISRTPEVTCVVVDVSHEDPEVKFNWYVDGVEVHNAKTKPCEEQYGSTYRCVSVLTVLHQDWLNGKEYKCKVSNKALPAPIEKTISKAKGQPREPQVYTLPPSREEMTKNQVSLTCLVKGFYPSDIAVEWESNGQPENNYKTTPPVLDSDGSFFLYSKLTVDKSRWQQGNVFSCSVMHEALHNHYTQKSLSLSPGK

SEQ ID NO: 535 - protein, 450 aa, Artificial Sequence
  source: /note="Description of Artificial Sequence: Synthetic polypeptide"
QVQLVESGGGVVQPGRSLRLSCAASGFSFSSYGMHWVRQPPGKGLEWVAAIWYDANNKYYADSVKGRFTISRDSSKNTLYLQMNSLRAEDTAVYYCARDRTIFGVVLEYWGQGTLVTVSSASTKGPSVFPLAPSSKSTSGGTAALGCLVKDYFPEPVTVSWNSGALTSGVHTFPAVLQSSGLYSLSSVVTVPSSSLGTQTYICNVNHKPSNTKVDKKVEPKSCDKTHTCPPCPAPELLGGPSVFLFPPKPKDTLMISRTPEVTCVVVDVSHEDPEVKFNWYVDGVEVHNAKTKPCEEQYGSTYRCVSVLTVLHQDWLNGKEYKCKVSNKALPAPIEKTISKAKGQPREPQVYTLPPSREEMTKNQVSLTCLVKGFYPSDIAVEWESNGQPENNYKTTPPVLDSDGSFFLYSKLTVDKSRWQQGNVFSCSVMHEALHNHYTQKSLSLSPGK

SEQ ID NO: 536 - protein, 450 aa, Artificial Sequence; identical to SEQ ID NO: 527
  source: /note="Description of Artificial Sequence: Synthetic polypeptide"

SEQ ID NO: 537 - protein, 450 aa, Artificial Sequence; identical to SEQ ID NO: 529
  source: /note="Description of Artificial Sequence: Synthetic polypeptide"

SEQ ID NO: 538 - protein, 450 aa, Artificial Sequence
  source: /note="Description of Artificial Sequence: Synthetic polypeptide"
QVQLVESGGGVVQPGRSLRLSCAASGFSFSSYGMHWVRQAPGKGLEWVAVIWYDASNKYYEDAVKGRFTISRDNSKNTLFLQVNSLRAEDTAVYYCARGITIFGHGFEYWGQGTLVTVSSASTKGPSVFPLAPSSKSTSGGTAALGCLVKDYFPEPVTVSWNSGALTSGVHTFPAVLQSSGLYSLSSVVTVPSSSLGTQTYICNVNHKPSNTKVDKKVEPKSCDKTHTCPPCPAPELLGGPSVFLFPPKPKDTLMISRTPEVTCVVVDVSHEDPEVKFNWYVDGVEVHNAKTKPCEEQYGSTYRCVSVLTVLHQDWLNGKEYKCKVSNKALPAPIEKTISKAKGQPREPQVYTLPPSREEMTKNQVSLTCLVKGFYPSDIAVEWESNGQPENNYKTTPPVLDSDGSFFLYSKLTVDKSRWQQGNVFSCSVMHEALHNHYTQKSLSLSPGK

SEQ ID NO: 539 - protein, 450 aa, Artificial Sequence
  source: /note="Description of Artificial Sequence: Synthetic polypeptide"
QVQLVESGGGVVQPGRSLRLSCAASGFSFSSYGMHWVRQAPGKGLEWVAVIWYDGSNKYYEDSVKGRFTISRDNSKNTLFLQVNSLRAEDTAVYYCARGITIFGHGFEYWGQGTLVTVSSASTKGPSVFPLAPSSKSTSGGTAALGCLVKDYFPEPVTVSWNSGALTSGVHTFPAVLQSSGLYSLSSVVTVPSSSLGTQTYICNVNHKPSNTKVDKKVEPKSCDKTHTCPPCPAPELLGGPSVFLFPPKPKDTLMISRTPEVTCVVVDVSHEDPEVKFNWYVDGVEVHNAKTKPCEEQYGSTYRCVSVLTVLHQDWLNGKEYKCKVSNKALPAPIEKTISKAKGQPREPQVYTLPPSREEMTKNQVSLTCLVKGFYPSDIAVEWESNGQPENNYKTTPPVLDSDGSFFLYSKLTVDKSRWQQGNVFSCSVMHEALHNHYTQKSLSLSPGK

SEQ ID NO: 540 - protein, 450 aa, Artificial Sequence
  source: /note="Description of Artificial Sequence: Synthetic polypeptide"
QVQLVESGGGVVQPGRSLRLSCAASGFSFSSYGMHWVRQAPGKGLEWVAVIWYDGSNKYYEDAVKGRFTISRDNSKNTLFLQVNSLRAEDTAVYYCARGITIFGHGFEYWGQGTLVTVSSASTKGPSVFPLAPSSKSTSGGTAALGCLVKDYFPEPVTVSWNSGALTSGVHTFPAVLQSSGLYSLSSVVTVPSSSLGTQTYICNVNHKPSNTKVDKKVEPKSCDKTHTCPPCPAPELLGGPSVFLFPPKPKDTLMISRTPEVTCVVVDVSHEDPEVKFNWYVDGVEVHNAKTKPCEEQYGSTYRCVSVLTVLHQDWLNGKEYKCKVSNKALPAPIEKTISKAKGQPREPQVYTLPPSREEMTKNQVSLTCLVKGFYPSDIAVEWESNGQPENNYKTTPPVLDSDGSFFLYSKLTVDKSRWQQGNVFSCSVMHEALHNHYTQKSLSLSPGK

SEQ ID NO: 541 - protein, 450 aa, Artificial Sequence
  source: /note="Description of Artificial Sequence: Synthetic polypeptide"
QVQLVESGGGVVQPGRSLRLSCAASGFSFSSYGMHWVRQAPGKGLEWVAVIWYDASNKYYEDSVKGRFTISRDNSKNTLFLQVNSLRAEDTAVYYCARGITIFGHGFEYWGQGTLVTVSSASTKGPSVFPLAPSSKSTSGGTAALGCLVKDYFPEPVTVSWNSGALTSGVHTFPAVLQSSGLYSLSSVVTVPSSSLGTQTYICNVNHKPSNTKVDKKVEPKSCDKTHTCPPCPAPELLGGPSVFLFPPKPKDTLMISRTPEVTCVVVDVSHEDPEVKFNWYVDGVEVHNAKTKPCEEQYGSTYRCVSVLTVLHQDWLNGKEYKCKVSNKALPAPIEKTISKAKGQPREPQVYTLPPSREEMTKNQVSLTCLVKGFYPSDIAVEWESNGQPENNYKTTPPVLDSDGSFFLYSKLTVDKSRWQQGNVFSCSVMHEALHNHYTQKSLSLSPGK

SEQ ID NO: 542 - protein, 450 aa, Artificial Sequence
  source: /note="Description of Artificial Sequence: Synthetic polypeptide"
QVQLVESGGGVVQPGRSLRLSCAASGFTFSNYGMHWVRQAPGEGLEWVAAIWFDASDKYYADAVKGRFTISRDNSKNTLYLQMNSLRAEDTAVYYCARDQAIFGVVPDYWGQGTLVTVSSASTKGPSVFPLAPSSKSTSGGTAALGCLVKDYFPEPVTVSWNSGALTSGVHTFPAVLQSSGLYSLSSVVTVPSSSLGTQTYICNVNHKPSNTKVDKKVEPKSCDKTHTCPPCPAPELLGGPSVFLFPPKPKDTLMISRTPEVTCVVVDVSHEDPEVKFNWYVDGVEVHNAKTKPCEEQYGSTYRCVSVLTVLHQDWLNGKEYKCKVSNKALPAPIEKTISKAKGQPREPQVYTLPPSREEMTKNQVSLTCLVKGFYPSDIAVEWESNGQPENNYKTTPPVLDSDGSFFLYSKLTVDKSRWQQGNVFSCSVMHEALHNHYTQKSLSLSPGK

SEQ ID NO: 543 - protein, 450 aa, Artificial Sequence
  source: /note="Description of Artificial Sequence: Synthetic polypeptide"
QVQLVESGGGVVQPGRSLRLSCAASGFTFSNYGMHWVRQAPGEGLEWVAAIWFDASDKYYADSVKGRFTISRDNSKNTLYLQMNSLRAEDTAVYYCARDQAIFGVVPDYWGQGTLVTVSSASTKGPSVFPLAPSSKSTSGGTAALGCLVKDYFPEPVTVSWNSGALTSGVHTFPAVLQSSGLYSLSSVVTVPSSSLGTQTYICNVNHKPSNTKVDKKVEPKSCDKTHTCPPCPAPELLGGPSVFLFPPKPKDTLMISRTPEVTCVVVDVSHEDPEVKFNWYVDGVEVHNAKTKPCEEQYGSTYRCVSVLTVLHQDWLNGKEYKCKVSNKALPAPIEKTISKAKGQPREPQVYTLPPSREEMTKNQVSLTCLVKGFYPSDIAVEWESNGQPENNYKTTPPVLDSDGSFFLYSKLTVDKSRWQQGNVFSCSVMHEALHNHYTQKSLSLSPGK

SEQ ID NO: 544 - protein, 450 aa, Artificial Sequence
  source: /note="Description of Artificial Sequence: Synthetic polypeptide"
QVQLVESGGGVVQPGRSLRLSCAASGFTFSNYGMHWVRQAPGEGLEWVAAIWFDGSDKYYADAVKGRFTISRDNSKNTLYLQMNSLRAEDTAVYYCARDQAIFGVVPDYWGQGTLVTVSSASTKGPSVFPLAPSSKSTSGGTAALGCLVKDYFPEPVTVSWNSGALTSGVHTFPAVLQSSGLYSLSSVVTVPSSSLGTQTYICNVNHKPSNTKVDKKVEPKSCDKTHTCPPCPAPELLGGPSVFLFPPKPKDTLMISRTPEVTCVVVDVSHEDPEVKFNWYVDGVEVHNAKTKPCEEQYGSTYRCVSVLTVLHQDWLNGKEYKCKVSNKALPAPIEKTISKAKGQPREPQVYTLPPSREEMTKNQVSLTCLVKGFYPSDIAVEWESNGQPENNYKTTPPVLDSDGSFFLYSKLTVDKSRWQQGNVFSCSVMHEALHNHYTQKSLSLSPGK

SEQ ID NO: 545 - protein, 450 aa, Artificial Sequence; identical to SEQ ID NO: 542
  source: /note="Description of Artificial Sequence: Synthetic polypeptide"

SEQ ID NO: 546 - protein, 450 aa, Artificial Sequence
  source: /note="Description of Artificial Sequence: Synthetic polypeptide"
QVQLVESGGGVVQPGRSLRLSCAASGFTFSNYGMHWVRQAPGKGLEWVAAIWFDASDKYYADAVKGRFTISRDNSKNTLYLQMNSLRAEDTAVYYCARDQAIFGVVPDYWGQGTLVTVSSASTKGPSVFPLAPSSKSTSGGTAALGCLVKDYFPEPVTVSWNSGALTSGVHTFPAVLQSSGLYSLSSVVTVPSSSLGTQTYICNVNHKPSNTKVDKKVEPKSCDKTHTCPPCPAPELLGGPSVFLFPPKPKDTLMISRTPEVTCVVVDVSHEDPEVKFNWYVDGVEVHNAKTKPCEEQYGSTYRCVSVLTVLHQDWLNGKEYKCKVSNKALPAPIEKTISKAKGQPREPQVYTLPPSREEMTKNQVSLTCLVKGFYPSDIAVEWESNGQPENNYKTTPPVLDSDGSFFLYSKLTVDKSRWQQGNVFSCSVMHEALHNHYTQKSLSLSPGK

SEQ ID NO: 547 - protein, 450 aa, Artificial Sequence; identical to SEQ ID NO: 546
  source: /note="Description of Artificial Sequence: Synthetic polypeptide"

SEQ ID NO: 548 - protein, 450 aa, Artificial Sequence; identical to SEQ ID NO: 542
  source: /note="Description of Artificial Sequence: Synthetic polypeptide"

SEQ ID NO: 549 - protein, 450 aa, Artificial Sequence; identical to SEQ ID NO: 546
  source: /note="Description of Artificial Sequence: Synthetic polypeptide"

SEQ ID NO: 550 - protein, 456 aa, Artificial Sequence
  source: /note="Description of Artificial Sequence: Synthetic polypeptide"
QVQLQESGPGLVKPSETLSLTCTVSGDSISSGGYYWSWIRQPPGKGLEWIGYIYYSGSTYYNPSLKSRVTISVDTSKNQFSLKLSSVTAADTAVYYCARDRITIFGVVMGGGMDVWGQGTTVTVSSASTKGPSVFPLAPSSKSTSGGTAALGCLVKDYFPEPVTVSWNSGALTSGVHTFPAVLQSSGLYSLSSVVTVPSSSLGTQTYICNVNHKPSNTKVDKKVEPKSCDKTHTCPPCPAPELLGGPSVFLFPPKPKDTLMISRTPEVTCVVVDVSHEDPEVKFNWYVDGVEVHNAKTKPCEEQYGSTYRCVSVLTVLHQDWLNGKEYKCKVSNKALPAPIEKTISKAKGQPREPQVYTLPPSREEMTKNQVSLTCLVKGFYPSDIAVEWESNGQPENNYKTTPPVLDSDGSFFLYSKLTVDKSRWQQGNVFSCSVMHEALHNHYTQKSLSLSPGK

SEQ ID NO: 551 - protein, 456 aa, Artificial Sequence; identical to SEQ ID NO: 550
  source: /note="Description of Artificial Sequence: Synthetic polypeptide"

SEQ ID NO: 552 - protein, 456 aa, Artificial Sequence
  source: /note="Description of Artificial Sequence: Synthetic polypeptide"
QVQLQESGPGLVKPSQTLSLTCTVSGDSISSGGYYWSWIRQPPGKGLEWIGYIYYSGSTYYNPSLKSRVTISVDTSKNQFSLKLSSVTAADTAVYYCARDRITIFGVVMGGGMDVWGQGTTVTVSSASTKGPSVFPLAPSSKSTSGGTAALGCLVKDYFPEPVTVSWNSGALTSGVHTFPAVLQSSGLYSLSSVVTVPSSSLGTQTYICNVNHKPSNTKVDKKVEPKSCDKTHTCPPCPAPELLGGPSVFLFPPKPKDTLMISRTPEVTCVVVDVSHEDPEVKFNWYVDGVEVHNAKTKPCEEQYGSTYRCVSVLTVLHQDWLNGKEYKCKVSNKALPAPIEKTISKAKGQPREPQVYTLPPSREEMTKNQVSLTCLVKGFYPSDIAVEWESNGQPENNYKTTPPVLDSDGSFFLYSKLTVDKSRWQQGNVFSCSVMHEALHNHYTQKSLSLSPGK

SEQ ID NO: 553 - protein, 456 aa, Artificial Sequence
  source: /note="Description of Artificial Sequence: Synthetic polypeptide"
QVQLQESGPGLVKPSETLSLTCTVSGDSISSGGYYWSWIRQHPGKGLEWIGYIYYSGSTYYNPSLKSRVTISVDTSKNQFSLKLSSVTAADTAVYYCARDRITIFGVVMGGGMDVWGQGTTVTVSSASTKGPSVFPLAPSSKSTSGGTAALGCLVKDYFPEPVTVSWNSGALTSGVHTFPAVLQSSGLYSLSSVVTVPSSSLGTQTYICNVNHKPSNTKVDKKVEPKSCDKTHTCPPCPAPELLGGPSVFLFPPKPKDTLMISRTPEVTCVVVDVSHEDPEVKFNWYVDGVEVHNAKTKPCEEQYGSTYRCVSVLTVLHQDWLNGKEYKCKVSNKALPAPIEKTISKAKGQPREPQVYTLPPSREEMTKNQVSLTCLVKGFYPSDIAVEWESNGQPENNYKTTPPVLDSDGSFFLYSKLTVDKSRWQQGNVFSCSVMHEALHNHYTQKSLSLSPGK

SEQ ID NO: 554 - protein, 456 aa, Artificial Sequence; identical to SEQ ID NO: 480
  source: /note="Description of Artificial Sequence: Synthetic polypeptide"

SEQ ID NO: 555 - protein, 456 aa, Artificial Sequence; identical to SEQ ID NO: 553
  source: /note="Description of Artificial Sequence: Synthetic polypeptide"

SEQ ID NO: 556 - protein, 456 aa, Artificial Sequence; identical to SEQ ID NO: 552
  source: /note="Description of Artificial Sequence: Synthetic polypeptide"

SEQ ID NO: 557 - protein, 453 aa, Artificial Sequence
  source: /note="Description of Artificial Sequence: Synthetic polypeptide"
QVQLVQSGAEVKKPGASVKVSCKASGYTFTGYYIHWVRQAPGQGLEWMGWINPESGGTDYSQRFQGRVTMTRDTSISTAYMELNRLRSDDTAVYYCAREATIFGMVIVPFDYWGQGTLVTVSSASTKGPSVFPLAPSSKSTSGGTAALGCLVKDYFPEPVTVSWNSGALTSGVHTFPAVLQSSGLYSLSSVVTVPSSSLGTQTYICNVNHKPSNTKVDKKVEPKSCDKTHTCPPCPAPELLGGPSVFLFPPKPKDTLMISRTPEVTCVVVDVSHEDPEVKFNWYVDGVEVHNAKTKPCEEQYGSTYRCVSVLTVLHQDWLNGKEYKCKVSNKALPAPIEKTISKAKGQPREPQVYTLPPSREEMTKNQVSLTCLVKGFYPSDIAVEWESNGQPENNYKTTPPVLDSDGSFFLYSKLTVDKSRWQQGNVFSCSVMHEALHNHYTQKSLSLSPGK

SEQ ID NO: 558 - protein, 453 aa, Artificial Sequence
  source: /note="Description of Artificial Sequence: Synthetic polypeptide"
QVPLVQSGAEVKKPGASVKVSCKASGYTFTGYYIHWVRQAPGQGLEWMGWINPESGGTDYSQRFQGRFTMTRDTSISTAYMELNRLRSDDTAVYYCAREATIFGMVIVPFDYWGQGTLVTVSSASTKGPSVFPLAPSSKSTSGGTAALGCLVKDYFPEPVTVSWNSGALTSGVHTFPAVLQSSGLYSLSSVVTVPSSSLGTQTYICNVNHKPSNTKVDKKVEPKSCDKTHTCPPCPAPELLGGPSVFLFPPKPKDTLMISRTPEVTCVVVDVSHEDPEVKFNWYVDGVEVHNAKTKPCEEQYGSTYRCVSVLTVLHQDWLNGKEYKCKVSNKALPAPIEKTISKAKGQPREPQVYTLPPSREEMTKNQVSLTCLVKGFYPSDIAVEWESNGQPENNYKTTPPVLDSDGSFFLYSKLTVDKSRWQQGNVFSCSVMHEALHNHYTQKSLSLSPGK

SEQ ID NO: 559 - protein, 453 aa, Artificial Sequence
  source: /note="Description of Artificial Sequence: Synthetic polypeptide"
QVQLVQSGAEVKKPGASVKVSCKASGYTFTGYYIHWVRQAPGQGLEWMGWINPDAGGTDYSQRFQGRVTMTRDTSISTAYMELNRLRSDDTAVYYCAREATIFGMVIVPFDYWGQGTLVTVSSASTKGPSVFPLAPSSKSTSGGTAALGCLVKDYFPEPVTVSWNSGALTSGVHTFPAVLQSSGLYSLSSVVTVPSSSLGTQTYICNVNHKPSNTKVDKKVEPKSCDKTHTCPPCPAPELLGGPSVFLFPPKPKDTLMISRTPEVTCVVVDVSHEDPEVKFNWYVDGVEVHNAKTKPCEEQYGSTYRCVSVLTVLHQDWLNGKEYKCKVSNKALPAPIEKTISKAKGQPREPQVYTLPPSREEMTKNQVSLTCLVKGFYPSDIAVEWESNGQPENNYKTTPPVLDSDGSFFLYSKLTVDKSRWQQGNVFSCSVMHEALHNHYTQKSLSLSPGK

SEQ ID NO: 560 - protein, 453 aa, Artificial Sequence
  source: /note="Description of Artificial Sequence: Synthetic polypeptide"
QVPLVQSGAEVKKPGASVKVSCKASGYTFTGYYIHWVRQAPGQGLEWMGWINPDAGGTDYSQRFQGRFTMTRDTSISTAYMELNRLRSDDTAVYYCAREATIFGMVIVPFDYWGQGTLVTVSSASTKGPSVFPLAPSSKSTSGGTAALGCLVKDYFPEPVTVSWNSGALTSGVHTFPAVLQSSGLYSLSSVVTVPSSSLGTQTYICNVNHKPSNTKVDKKVEPKSCDKTHTCPPCPAPELLGGPSVFLFPPKPKDTLMISRTPEVTCVVVDVSHEDPEVKFNWYVDGVEVHNAKTKPCEEQYGSTYRCVSVLTVLHQDWLNGKEYKCKVSNKALPAPIEKTISKAKGQPREPQVYTLPPSREEMTKNQVSLTCLVKGFYPSDIAVEWESNGQPENNYKTTPPVLDSDGSFFLYSKLTVDKSRWQQGNVFSCSVMHEALHNHYTQKSLSLSPGK

SEQ ID NO: 561 - protein, 453 aa, Artificial Sequence
  source: /note="Description of Artificial Sequence: Synthetic polypeptide"
QVQLVQSGAEVKKPGASVKVSCKASGYTFTGYYIHWVRQAPGQGLEWMGWINPDSGGTDYSQRFQGRVTMTRDTSISTAYMELNRLRSDDTAVYYCAREATIFGMVIVPFDYWGQGTLVTVSSASTKGPSVFPLAPSSKSTSGGTAALGCLVKDYFPEPVTVSWNSGALTSGVHTFPAVLQSSGLYSLSSVVTVPSSSLGTQTYICNVNHKPSNTKVDKKVEPKSCDKTHTCPPCPAPELLGGPSVFLFPPKPKDTLMISRTPEVTCVVVDVSHEDPEVKFNWYVDGVEVHNAKTKPCEEQYGSTYRCVSVLTVLHQDWLNGKEYKCKVSNKALPAPIEKTISKAKGQPREPQVYTLPPSREEMTKNQVSLTCLVKGFYPSDIAVEWESNGQPENNYKTTPPVLDSDGSFFLYSKLTVDKSRWQQGNVFSCSVMHEALHNHYTQKSLSLSPGK

SEQ ID NO: 562 - protein, 453 aa, Artificial Sequence
  source: /note="Description of Artificial Sequence: Synthetic polypeptide"
QVQLVQSGAEVKKPGASVKVSCKASGYTFTGYYIHWVRQAPGQGLEWMGWINPDSGGTDYSQRFQGRFTMTRDTSISTAYMELNRLRSDDTAVYYCAREATIFGMVIVPFDYWGQGTLVTVSSASTKGPSVFPLAPSSKSTSGGTAALGCLVKDYFPEPVTVSWNSGALTSGVHTFPAVLQSSGLYSLSSVVTVPSSSLGTQTYICNVNHKPSNTKVDKKVEPKSCDKTHTCPPCPAPELLGGPSVFLFPPKPKDTLMISRTPEVTCVVVDVSHEDPEVKFNWYVDGVEVHNAKTKPCEEQYGSTYRCVSVLTVLHQDWLNGKEYKCKVSNKALPAPIEKTISKAKGQPREPQVYTLPPSREEMTKNQVSLTCLVKGFYPSDIAVEWESNGQPENNYKTTPPVLDSDGSFFLYSKLTVDKSRWQQGNVFSCSVMHEALHNHYTQKSLSLSPGK

SEQ ID NO: 563 - protein, 453 aa, Artificial Sequence
  source: /note="Description of Artificial Sequence: Synthetic polypeptide"
QVPLVQSGAEVKKPGASVKVSCKASGYTFTGYYIHWVRQAPGQGLEWMGWINPDSGGTDYSQRFQGRVTMTRDTSISTAYMELNRLRSDDTAVYYCAREATIFGMVIVPFDYWGQGTLVTVSSASTKGPSVFPLAPSSKSTSGGTAALGCLVKDYFPEPVTVSWNSGALTSGVHTFPAVLQSSGLYSLSSVVTVPSSSLGTQTYICNVNHKPSNTKVDKKVEPKSCDKTHTCPPCPAPELLGGPSVFLFPPKPKDTLMISRTPEVTCVVVDVSHEDPEVKFNWYVDGVEVHNAKTKPCEEQYGSTYRCVSVLTVLHQDWLNGKEYKCKVSNKALPAPIEKTISKAKGQPREPQVYTLPPSREEMTKNQVSLTCLVKGFYPSDIAVEWESNGQPENNYKTTPPVLDSDGSFFLYSKLTVDKSRWQQGNVFSCSVMHEALHNHYTQKSLSLSPGK

SEQ ID NO: 564 - protein, 453 aa, Artificial Sequence
  source: /note="Description of Artificial Sequence: Synthetic polypeptide"
QVQLVQSGAEVKKPGASVKVSCKASGYTFTGYYIHWVRQAPGQGLEWMGWINPDAGGTDYSQRFQGRFTMTRDTSISTAYMELNRLRSDDTAVYYCAREATIFGMVIVPFDYWGQGTLVTVSSASTKGPSVFPLAPSSKSTSGGTAALGCLVKDYFPEPVTVSWNSGALTSGVHTFPAVLQSSGLYSLSSVVTVPSSSLGTQTYICNVNHKPSNTKVDKKVEPKSCDKTHTCPPCPAPELLGGPSVFLFPPKPKDTLMISRTPEVTCVVVDVSHEDPEVKFNWYVDGVEVHNAKTKPCEEQYGSTYRCVSVLTVLHQDWLNGKEYKCKVSNKALPAPIEKTISKAKGQPREPQVYTLPPSREEMTKNQVSLTCLVKGFYPSDIAVEWESNGQPENNYKTTPPVLDSDGSFFLYSKLTVDKSRWQQGNVFSCSVMHEALHNHYTQKSLSLSPGK

SEQ ID NO: 565 - protein, 453 aa, Artificial Sequence
  source: /note="Description of Artificial Sequence: Synthetic polypeptide"
QVPLVQSGAEVKKPGASVKVSCKASGYTFTGYYIHWVRQAPGQGLEWMGWINPDAGGTDYSQRFQGRVTMTRDTSISTAYMELNRLRSDDTAVYYCAREATIFGMVIVPFDYWGQGTLVTVSSASTKGPSVFPLAPSSKSTSGGTAALGCLVKDYFPEPVTVSWNSGALTSGVHTFPAVLQSSGLYSLSSVVTVPSSSLGTQTYICNVNHKPSNTKVDKKVEPKSCDKTHTCPPCPAPELLGGPSVFLFPPKPKDTLMISRTPEVTCVVVDVSHEDPEVKFNWYVDGVEVHNAKTKPCEEQYGSTYRCVSVLTVLHQDWLNGKEYKCKVSNKALPAPIEKTISKAKGQPREPQVYTLPPSREEMTKNQVSLTCLVKGFYPSDIAVEWESNGQPENNYKTTPPVLDSDGSFFLYSKLTVDKSRWQQGNVFSCSVMHEALHNHYTQKSLSLSPGK

SEQ ID NO: 566 - protein, 453 aa, Artificial Sequence
  source: /note="Description of Artificial Sequence: Synthetic polypeptide"
QVQLVQSGAEVKKPGASVKVSCKASGYTFTGYYIHWVRQAPGQGLEWMGWINPDAGGTDYSQRFQGRVTMTRDTSISTAYMELNSLRSDDTAVYYCAREATIFGMVIVPFDYWGQGTLVTVSSASTKGPSVFPLAPSSKSTSGGTAALGCLVKDYFPEPVTVSWNSGALTSGVHTFPAVLQSSGLYSLSSVVTVPSSSLGTQTYICNVNHKPSNTKVDKKVEPKSCDKTHTCPPCPAPELLGGPSVFLFPPKPKDTLMISRTPEVTCVVVDVSHEDPEVKFNWYVDGVEVHNAKTKPCEEQYGSTYRCVSVLTVLHQDWLNGKEYKCKVSNKALPAPIEKTISKAKGQPREPQVYTLPPSREEMTKNQVSLTCLVKGFYPSDIAVEWESNGQPENNYKTTPPVLDSDGSFFLYSKLTVDKSRWQQGNVFSCSVMHEALHNHYTQKSLSLSPGK

SEQ ID NO: 567 - protein, 453 aa, Artificial Sequence
  source: /note="Description of Artificial Sequence: Synthetic polypeptide"
QVQLVQSGAEVKKPGASVKVSCKASGYTFTGYYIHWVRQAPGQGLEWMGWINPESGGTDYSQRFQGRVTMTRDTSISTAYMELNSLRSDDTAVYYCAREATIFGMVIVPFDYWGQGTLVTVSSASTKGPSVFPLAPSSKSTSGGTAALGCLVKDYFPEPVTVSWNSGALTSGVHTFPAVLQSSGLYSLSSVVTVPSSSLGTQTYICNVNHKPSNTKVDKKVEPKSCDKTHTCPPCPAPELLGGPSVFLFPPKPKDTLMISRTPEVTCVVVDVSHEDPEVKFNWYVDGVEVHNAKTKPCEEQYGSTYRCVSVLTVLHQDWLNGKEYKCKVSNKALPAPIEKTISKAKGQPREPQVYTLPPSREEMTKNQVSLTCLVKGFYPSDIAVEWESNGQPENNYKTTPPVLDSDGSFFLYSKLTVDKSRWQQGNVFSCSVMHEALHNHYTQKSLSLSPGK

SEQ ID NO: 568 - protein, 453 aa, Artificial Sequence
  source: /note="Description of Artificial Sequence: Synthetic polypeptide"
QVPLVQSGAEVKKPGASVKVSCKASGYTFTGYYIHWVRQAPGQGLVWMGWISPNSGETSYAQKFQDRVTMTRDTSISTAYMELSRLRSDDTAVYFCAREATIFGMLIVPFDYWGQGTLVTVSSASTKGPSVFPLAPSSKSTSGGTAALGCLVKDYFPEPVTVSWNSGALTSGVHTFPAVLQSSGLYSLSSVVTVPSSSLGTQTYICNVNHKPSNTKVDKKVEPKSCDKTHTCPPCPAPELLGGPSVFLFPPKPKDTLMISRTPEVTCVVVDVSHEDPEVKFNWYVDGVEVHNAKTKPCEEQYGSTYRCVSVLTVLHQDWLNGKEYKCKVSNKALPAPIEKTISKAKGQPREPQVYTLPPSREEMTKNQVSLTCLVKGFYPSDIAVEWESNGQPENNYKTTPPVLDSDGSFFLYSKLTVDKSRWQQGNVFSCSVMHEALHNHYTQKSLSLSPGK

SEQ ID NO: 569 - protein, 453 aa, Artificial Sequence
  source: /note="Description of Artificial Sequence: Synthetic polypeptide"
QVPLVQSGAEVKKPGASVKVSCKASGYTFTGYYIHWVRQAPGQGLVWMGWISPNSGDTSYAQKFQDRVTMTRDTSISTAYMELSRLRSDDTAVYFCAREATIFGMLIVPFDYWGQGTLVTVSSASTKGPSVFPLAPSSKSTSGGTAALGCLVKDYFPEPVTVSWNSGALTSGVHTFPAVLQSSGLYSLSSVVTVPSSSLGTQTYICNVNHKPSNTKVDKKVEPKSCDKTHTCPPCPAPELLGGPSVFLFPPKPKDTLMISRTPEVTCVVVDVSHEDPEVKFNWYVDGVEVHNAKTKPCEEQYGSTYRCVSVLTVLHQDWLNGKEYKCKVSNKALPAPIEKTISKAKGQPREPQVYTLPPSREEMTKNQVSLTCLVKGFYPSDIAVEWESNGQPENNYKTTPPVLDSDGSFFLYSKLTVDKSRWQQGNVFSCSVMHEALHNHYTQKSLSLSPGK

SEQ ID NO: 570 - protein, 453 aa, Artificial Sequence; identical to SEQ ID NO: 568
  source: /note="Description of Artificial Sequence: Synthetic polypeptide"

SEQ ID NO: 571 - protein, 453 aa, Artificial Sequence
  source: /note="Description of Artificial Sequence: Synthetic polypeptide"
QVPLVQSGAEVKKPGASVKVSCKASGYTFTGYYIHWVRQAPGQGLVWMGWISPNSGETSYAQKFQDRVTMTRDTSISTAYMELSRLRSDDTAVYFCTREATIFGMLIVPFDYWGQGTLVTVSSASTKGPSVFPLAPSSKSTSGGTAALGCLVKDYFPEPVTVSWNSGALTSGVHTFPAVLQSSGLYSLSSVVTVPSSSLGTQTYICNVNHKPSNTKVDKKVEPKSCDKTHTCPPCPAPELLGGPSVFLFPPKPKDTLMISRTPEVTCVVVDVSHEDPEVKFNWYVDGVEVHNAKTKPCEEQYGSTYRCVSVLTVLHQDWLNGKEYKCKVSNKALPAPIEKTISKAKGQPREPQVYTLPPSREEMTKNQVSLTCLVKGFYPSDIAVEWESNGQPENNYKTTPPVLDSDGSFFLYSKLTVDKSRWQQGNVFSCSVMHEALHNHYTQKSLSLSPGK

SEQ ID NO: 572 - protein, 453 aa, Artificial Sequence; identical to SEQ ID NO: 478
  source: /note="Description of Artificial Sequence: Synthetic polypeptide"

SEQ ID NO: 573 - protein, 453 aa, Artificial Sequence; identical to SEQ ID NO: 571
  source: /note="Description of Artificial Sequence: Synthetic polypeptide"

SEQ ID NO: 574 - protein, 453 aa, Artificial Sequence; identical to SEQ ID NO: 569
  source: /note="Description of Artificial Sequence: Synthetic polypeptide"

SEQ ID NO: 575 - protein, 453 aa, Artificial Sequence
  source: /note="Description of Artificial Sequence: Synthetic polypeptide"
QVQLVQSGAEVKKPGASVKVSCKASGYTFTGYYIHWVRQAPGQGLEWMGWISPNSGETSYAQKFQDRVTMTRDTSISTAYMELSSLRSDDTAVYFCAREATIFGMLIVPFDYWGQGTLVTVSSASTKGPSVFPLAPSSKSTSGGTAALGCLVKDYFPEPVTVSWNSGALTSGVHTFPAVLQSSGLYSLSSVVTVPSSSLGTQTYICNVNHKPSNTKVDKKVEPKSCDKTHTCPPCPAPELLGGPSVFLFPPKPKDTLMISRTPEVTCVVVDVSHEDPEVKFNWYVDGVEVHNAKTKPCEEQYGSTYRCVSVLTVLHQDWLNGKEYKCKVSNKALPAPIEKTISKAKGQPREPQVYTLPPSREEMTKNQVSLTCLVKGFYPSDIAVEWESNGQPENNYKTTPPVLDSDGSFFLYSKLTVDKSRWQQGNVFSCSVMHEALHNHYTQKSLSLSPGK

SEQ ID NO: 576 - protein, 453 aa, Artificial Sequence
  source: /note="Description of Artificial Sequence: Synthetic polypeptide"
QVQLVQSGAEVKKPGASVKVSCKASGYTFTGYYIHWVRQAPGQGLEWMGWISPNSGETSYAQKFQDRVTMTRDTSISTAYMELSRLRSDDTAVYFCAREATIFGMLIVPFDYWGQGTLVTVSSASTKGPSVFPLAPSSKSTSGGTAALGCLVKDYFPEPVTVSWNSGALTSGVHTFPAVLQSSGLYSLSSVVTVPSSSLGTQTYICNVNHKPSNTKVDKKVEPKSCDKTHTCPPCPAPELLGGPSVFLFPPKPKDTLMISRTPEVTCVVVDVSHEDPEVKFNWYVDGVEVHNAKTKPCEEQYGSTYRCVSVLTVLHQDWLNGKEYKCKVSNKALPAPIEKTISKAKGQPREPQVYTLPPSREEMTKNQVSLTCLVKGFYPSDIAVEWESNGQPENNYKTTPPVLDSDGSFFLYSKLTVDKSRWQQGNVFSCSVMHEALHNHYTQKSLSLSPGK

SEQ ID NO: 577 - protein, 453 aa, Artificial Sequence
  source: /note="Description of Artificial Sequence: Synthetic polypeptide"
QVPLVQSGAEVKKPGASVKVSCKASGYTFTGYYIHWVRQAPGQGLEWMGWINPESGGTDYSQRFQGRVTMTRDTSISTAYMELSRLRSDDTAVYYCAREATIFGMVIVPFDYWGQGTLVTVSSASTKGPSVFPLAPSSKSTSGGTAALGCLVKDYFPEPVTVSWNSGALTSGVHTFPAVLQSSGLYSLSSVVTVPSSSLGTQTYICNVNHKPSNTKVDKKVEPKSCDKTHTCPPCPAPELLGGPSVFLFPPKPKDTLMISRTPEVTCVVVDVSHEDPEVKFNWYVDGVEVHNAKTKPCEEQYGSTYRCVSVLTVLHQDWLNGKEYKCKVSNKALPAPIEKTISKAKGQPREPQVYTLPPSREEMTKNQVSLTCLVKGFYPSDIAVEWESNGQPENNYKTTPPVLDSDGSFFLYSKLTVDKSRWQQGNVFSCSVMHEALHNHYTQKSLSLSPGK

SEQ ID NO: 578 - protein, 453 aa, Artificial Sequence
  source: /note="Description of Artificial Sequence: Synthetic polypeptide"
QVPLVQSGAEVKKPGASVKVSCKASGYTFTGYYIHWVRQAPGQGLEWMGWINPESGGTDYSQRFQGRFTMTRDTSISTAYMELSRLRSDDTAVYYCAREATIFGMVIVPFDYWGQGTLVTVSSASTKGPSVFPLAPSSKSTSGGTAALGCLVKDYFPEPVTVSWNSGALTSGVHTFPAVLQSSGLYSLSSVVTVPSSSLGTQTYICNVNHKPSNTKVDKKVEPKSCDKTHTCPPCPAPELLGGPSVFLFPPKPKDTLMISRTPEVTCVVVDVSHEDPEVKFNWYVDGVEVHNAKTKPCEEQYGSTYRCVSVLTVLHQDWLNGKEYKCKVSNKALPAPIEKTISKAKGQPREPQVYTLPPSREEMTKNQVSLTCLVKGFYPSDIAVEWESNGQPENNYKTTPPVLDSDGSFFLYSKLTVDKSRWQQGNVFSCSVMHEALHNHYTQKSLSLSPGK

SEQ ID NO: 579 - protein, 453 aa, Artificial Sequence
  source: /note="Description of Artificial Sequence: Synthetic polypeptide"
QVPLVQSGAEVKKPGASVKVSCKASGYTFTGYYIHWVRQAPGQGLEWMGWINPDSGGTDYSQRFQGRVTMTRDTSISTAYMELSRLRSDDTAVYYCAREATIFGMVIVPFDYWGQGTLVTVSSASTKGPSVFPLAPSSKSTSGGTAALGCLVKDYFPEPVTVSWNSGALTSGVHTFPAVLQSSGLYSLSSVVTVPSSSLGTQTYICNVNHKPSNTKVDKKVEPKSCDKTHTCPPCPAPELLGGPSVFLFPPKPKDTLMISRTPEVTCVVVDVSHEDPEVKFNWYVDGVEVHNAKTKPCEEQYGSTYRCVSVLTVLHQDWLNGKEYKCKVSNKALPAPIEKTISKAKGQPREPQVYTLPPSREEMTKNQVSLTCLVKGFYPSDIAVEWESNGQPENNYKTTPPVLDSDGSFFLYSKLTVDKSRWQQGNVFSCSVMHEALHNHYTQKSLSLSPGK

SEQ ID NO: 580 - protein, 453 aa, Artificial Sequence
  source: /note="Description of Artificial Sequence: Synthetic polypeptide"
QVQLVQSGAEVKKPGASVKVSCKASGYTFTGYYIHWVRQAPGQGLEWMGWINPESGGTDYSQRFQGRVTMTRDTSISTAYMELSSLRSDDTAVYYCAREATIFGMVIVPFDYWGQGTLVTVSSASTKGPSVFPLAPSSKSTSGGTAALGCLVKDYFPEPVTVSWNSGALTSGVHTFPAVLQSSGLYSLSSVVTVPSSSLGTQTYICNVNHKPSNTKVDKKVEPKSCDKTHTCPPCPAPELLGGPSVFLFPPKPKDTLMISRTPEVTCVVVDVSHEDPEVKFNWYVDGVEVHNAKTKPCEEQYGSTYRCVSVLTVLHQDWLNGKEYKCKVSNKALPAPIEKTISKAKGQPREPQVYTLPPSREEMTKNQVSLTCLVKGFYPSDIAVEWESNGQPENNYKTTPPVLDSDGSFFLYSKLTVDKSRWQQGNVFSCSVMHEALHNHYTQKSLSLSPGK

SEQ ID NO: 581 - protein, 453 aa, Artificial Sequence; identical to SEQ ID NO: 577
  source: /note="Description of Artificial Sequence: Synthetic polypeptide"

SEQ ID NO: 582 - protein, 453 aa, Artificial Sequence
  source: /note="Description of Artificial Sequence: Synthetic polypeptide"
QVPLVQSGAEVKKPGASVKVSCKASGYTFTGYYIHWVRQAPGQGLEWMGWISPNQGETNYAQKFQDRVTMTRDTSISTAYMELSRLRSDDTAVYYCAREATIFGMLIVPFDYWGQGTLVTVSSASTKGPSVFPLAPSSKSTSGGTAALGCLVKDYFPEPVTVSWNSGALTSGVHTFPAVLQSSGLYSLSSVVTVPSSSLGTQTYICNVNHKPSNTKVDKKVEPKSCDKTHTCPPCPAPELLGGPSVFLFPPKPKDTLMISRTPEVTCVVVDVSHEDPEVKFNWYVDGVEVHNAKTKPCEEQYGSTYRCVSVLTVLHQDWLNGKEYKCKVSNKALPAPIEKTISKAKGQPREPQVYTLPPSREEMTKNQVSLTCLVKGFYPSDIAVEWESNGQPENNYKTTPPVLDSDGSFFLYSKLTVDKSRWQQGNVFSCSVMHEALHNHYTQKSLSLSPGK

SEQ ID NO: 583 - protein, 453 aa, Artificial Sequence
  source: /note="Description of Artificial Sequence: Synthetic polypeptide"
QVPLVQSGAEVKKPGASVKVSCKASGYTFTGYYIHWVRQAPGQGLEWMGWISPNQGDTNYAQKFQDRVTMTRDTSISTAYMELSRLRSDDTAVYYCAREATIFGMLIVPFDYWGQGTLVTVSSASTKGPSVFPLAPSSKSTSGGTAALGCLVKDYFPEPVTVSWNSGALTSGVHTFPAVLQSSGLYSLSSVVTVPSSSLGTQTYICNVNHKPSNTKVDKKVEPKSCDKTHTCPPCPAPELLGGPSVFLFPPKPKDTLMISRTPEVTCVVVDVSHEDPEVKFNWYVDGVEVHNAKTKPCEEQYGSTYRCVSVLTVLHQDWLNGKEYKCKVSNKALPAPIEKTISKAKGQPREPQVYTLPPSREEMTKNQVSLTCLVKGFYPSDIAVEWESNGQPENNYKTTPPVLDSDGSFFLYSKLTVDKSRWQQGNVFSCSVMHEALHNHYTQKSLSLSPGK

SEQ ID NO: 584 - protein, 453 aa, Artificial Sequence
  source: /note="Description of Artificial Sequence: Synthetic polypeptide"
QVPLVQSGAEVKKPGASVKVSCKASGYTFTGYYIHWVRQAPGQGLEWMGWISPNQGETNYAQKFQDRVTMTRDTSISTAYMELSRLRSDDTAVYYCTREATIFGMLIVPFDYWGQGTLVTVSSASTKGPSVFPLAPSSKSTSGGTAALGCLVKDYFPEPVTVSWNSGALTSGVHTFPAVLQSSGLYSLSSVVTVPSSSLGTQTYICNVNHKPSNTKVDKKVEPKSCDKTHTCPPCPAPELLGGPSVFLFPPKPKDTLMISRTPEVTCVVVDVSHEDPEVKFNWYVDGVEVHNAKTKPCEEQYGSTYRCVSVLTVLHQDWLNGKEYKCKVSNKALPAPIEKTISKAKGQPREPQVYTLPPSREEMTKNQVSLTCLVKGFYPSDIAVEWESNGQPENNYKTTPPVLDSDGSFFLYSKLTVDKSRWQQGNVFSCSVMHEALHNHYTQKSLSLSPGK

SEQ ID NO: 585 - protein, 453 aa, Artificial Sequence
  source: /note="Description of Artificial Sequence: Synthetic polypeptide"
QVPLVQSGAEVKKPGASVKVSCKASGYTFTGYYIHWVRQAPGQGLEWMGWISPNNGETNYAQKFQDRVTMTRDTSISTAYMELSRLRSDDTAVYYCAREATIFGMLIVPFDYWGQGTLVTVSSASTKGPSVFPLAPSSKSTSGGTAALGCLVKDYFPEPVTVSWNSGALTSGVHTFPAVLQSSGLYSLSSVVTVPSSSLGTQTYICNVNHKPSNTKVDKKVEPKSCDKTHTCPPCPAPELLGGPSVFLFPPKPKDTLMISRTPEVTCVVVDVSHEDPEVKFNWYVDGVEVHNAKTKPCEEQYGSTYRCVSVLTVLHQDWLNGKEYKCKVSNKALPAPIEKTISKAKGQPREPQVYTLPPSREEMTKNQVSLTCLVKGFYPSDIAVEWESNGQPENNYKTTPPVLDSDGSFFLYSKLTVDKSRWQQGNVFSCSVMHEALHNHYTQKSLSLSPGK

SEQ ID NO: 586 - protein, 453 aa, Artificial Sequence
  source: /note="Description of Artificial Sequence: Synthetic polypeptide"
QVPLVQSGAEVKKPGASVKVSCKASGYTFTGYYIHWVRQAPGQGLEWMGWISPNNGDTNYAQKFQDRVTMTRDTSISTAYMELSRLRSDDTAVYYCAREATIFGMLIVPFDYWGQGTLVTVSSASTKGPSVFPLAPSSKSTSGGTAALGCLVKDYFPEPVTVSWNSGALTSGVHTFPAVLQSSGLYSLSSVVTVPSSSLGTQTYICNVNHKPSNTKVDKKVEPKSCDKTHTCPPCPAPELLGGPSVFLFPPKPKDTLMISRTPEVTCVVVDVSHEDPEVKFNWYVDGVEVHNAKTKPCEEQYGSTYRCVSVLTVLHQDWLNGKEYKCKVSNKALPAPIEKTISKAKGQPREPQVYTLPPSREEMTKNQVSLTCLVKGFYPSDIAVEWESNGQPENNYKTTPPVLDSDGSFFLYSKLTVDKSRWQQGNVFSCSVMHEALHNHYTQKSLSLSPGK

SEQ ID NO: 587 - protein, 453 aa, Artificial Sequence
  source: /note="Description of Artificial Sequence: Synthetic polypeptide"
QVPLVQSGAEVKKPGASVKVSCKASGYTFTGYYIHWVRQAPGQGLEWMGWISPNQGDTNYAQKFQDRVTMTRDTSISTAYMELSRLRSDDTAVYYCTREATIFGMLIVPFDYWGQGTLVTVSSASTKGPSVFPLAPSSKSTSGGTAALGCLVKDYFPEPVTVSWNSGALTSGVHTFPAVLQSSGLYSLSSVVTVPSSSLGTQTYICNVNHKPSNTKVDKKVEPKSCDKTHTCPPCPAPELLGGPSVFLFPPKPKDTLMISRTPEVTCVVVDVSHEDPEVKFNWYVDGVEVHNAKTKPCEEQYGSTYRCVSVLTVLHQDWLNGKEYKCKVSNKALPAPIEKTISKAKGQPREPQVYTLPPSREEMTKNQVSLTCLVKGFYPSDIAVEWESNGQPENNYKTTPPVLDSDGSFFLYSKLTVDKSRWQQGNVFSCSVMHEALHNHYTQKSLSLSPGK

SEQ ID NO: 588 - protein, 453 aa, Artificial Sequence
  source: /note="Description of Artificial Sequence: Synthetic polypeptide"
QVPLVQSGAEVKKPGASVKVSCKASGYTFTGYYIHWVRQAPGQGLEWMGWISPNNGETNYAQKFQDRVTMTRDTSISTAYMELSRLRSDDTAVYYCTREATIFGMLIVPFDYWGQGTLVTVSSASTKGPSVFPLAPSSKSTSGGTAALGCLVKDYFPEPVTVSWNSGALTSGVHTFPAVLQSSGLYSLSSVVTVPSSSLGTQTYICNVNHKPSNTKVDKKVEPKSCDKTHTCPPCPAPELLGGPSVFLFPPKPKDTLMISRTPEVTCVVVDVSHEDPEVKFNWYVDGVEVHNAKTKPCEEQYGSTYRCVSVLTVLHQDWLNGKEYKCKVSNKALPAPIEKTISKAKGQPREPQVYTLPPSREEMTKNQVSLTCLVKGFYPSDIAVEWESNGQPENNYKTTPPVLDSDGSFFLYSKLTVDKSRWQQGNVFSCSVMHEALHNHYTQKSLSLSPGK

SEQ ID NO: 589 - protein, 453 aa, Artificial Sequence; identical to SEQ ID NO: 582
  source: /note="Description of Artificial Sequence: Synthetic polypeptide"

SEQ ID NO: 590 - protein, 453 aa, Artificial Sequence; identical to SEQ ID NO: 586
  source: /note="Description of Artificial Sequence: Synthetic polypeptide"

SEQ ID NO: 591 - protein, 453 aa, Artificial Sequence; identical to SEQ ID NO: 583
  source: /note="Description of Artificial Sequence: Synthetic polypeptide"

SEQ ID NO: 592 - protein, 453 aa, Artificial Sequence; identical to SEQ ID NO: 585
  source: /note="Description of Artificial Sequence: Synthetic polypeptide"

SEQ ID NO: 593 - protein, 453 aa, Artificial Sequence
  source: /note="Description of Artificial Sequence: Synthetic polypeptide"
QVQLVQSGAEVKKPGASVKVSCKASGYTFTGYYIHWVRQAPGQGLEWMGWISPNQGETNYAQKFQDRVTMTRDTSISTAYMELSSLRSDDTAVYYCAREATIFGMLIVPFDYWGQGTLVTVSSASTKGPSVFPLAPSSKSTSGGTAALGCLVKDYFPEPVTVSWNSGALTSGVHTFPAVLQSSGLYSLSSVVTVPSSSLGTQTYICNVNHKPSNTKVDKKVEPKSCDKTHTCPPCPAPELLGGPSVFLFPPKPKDTLMISRTPEVTCVVVDVSHEDPEVKFNWYVDGVEVHNAKTKPCEEQYGSTYRCVSVLTVLHQDWLNGKEYKCKVSNKALPAPIEKTISKAKGQPREPQVYTLPPSREEMTKNQVSLTCLVKGFYPSDIAVEWESNGQPENNYKTTPPVLDSDGSFFLYSKLTVDKSRWQQGNVFSCSVMHEALHNHYTQKSLSLSPGK

SEQ ID NO: 594 - protein, 453 aa, Artificial Sequence; identical to SEQ ID NO: 593
  source: /note="Description of Artificial Sequence: Synthetic polypeptide"

SEQ ID NO: 595 - protein, 458 aa, Artificial Sequence; identical to SEQ ID NO: 472
  source: /note="Description of Artificial Sequence: Synthetic polypeptide"

SEQ ID NO: 596 - protein, 458 aa, Artificial Sequence; identical to SEQ ID NO: 472
  source: /note="Description of Artificial Sequence: Synthetic polypeptide"

SEQ ID NO: 597 - protein, 458 aa, Artificial Sequence; identical to SEQ ID NO: 472
  source: /note="Description of Artificial Sequence: Synthetic polypeptide"

SEQ ID NO: 598 - protein, 458 aa, Artificial Sequence; identical to SEQ ID NO: 472
  source: /note="Description of Artificial Sequence: Synthetic polypeptide"

SEQ ID NO: 599 - protein, 458 aa, Artificial Sequence; identical to SEQ ID NO: 472
  source: /note="Description of Artificial Sequence: Synthetic polypeptide"

SEQ ID NO: 600 - protein, 458 aa, Artificial Sequence; identical to SEQ ID NO: 472
  source: /note="Description of Artificial Sequence: Synthetic polypeptide"

SEQ ID NO: 601 - protein, 458 aa, Artificial Sequence; identical to SEQ ID NO: 472
  source: /note="Description of Artificial Sequence: Synthetic polypeptide"

SEQ ID NO: 602 - protein, 458 aa, Artificial Sequence; identical to SEQ ID NO: 472
  source: /note="Description of Artificial Sequence: Synthetic polypeptide"

SEQ ID NO: 603 - protein, 458 aa, Artificial Sequence; identical to SEQ ID NO: 472
  source: /note="Description of Artificial Sequence: Synthetic polypeptide"

SEQ ID NO: 604 - protein, 458 aa, Artificial Sequence; identical to SEQ ID NO: 472
  source: /note="Description of Artificial Sequence: Synthetic polypeptide"

SEQ ID NO: 605 - protein, 458 aa, Artificial Sequence; identical to SEQ ID NO: 472
  source: /note="Description of Artificial Sequence: Synthetic polypeptide"

SEQ ID NO: 606 - protein, 458 aa, Artificial Sequence; identical to SEQ ID NO: 472
  source: /note="Description of Artificial Sequence: Synthetic polypeptide"

SEQ ID NO: 607 - protein, 458 aa, Artificial Sequence
  source: /note="Description of Artificial Sequence: Synthetic polypeptide"
QMQVVQSGAEVKKPGASVKVSCKASGYTFTGYYMHWVRQAPGQGLEWMGWINPNSGGTNYAQKFQGRVTMTRDTSISTAYMELSSLRSDDTAVYYCARGGDYVFGTYRPHYYYGMDVWGQGTTVTVSSASTKGPSVFPLAPSSKSTSGGTAALGCLVKDYFPEPVTVSWNSGALTSGVHTFPAVLQSSGLYSLSSVVTVPSSSLGTQTYICNVNHKPSNTKVDKKVEPKSCDKTHTCPPCPAPELLGGPSVFLFPPKPKDTLMISRTPEVTCVVVDVSHEDPEVKFNWYVDGVEVHNAKTKPCEEQYGSTYRCVSVLTVLHQDWLNGKEYKCKVSNKALPAPIEKTISKAKGQPREPQVYTLPPSREEMTKNQVSLTCLVKGFYPSDIAVEWESNGQPENNYKTTPPVLDSDGSFFLYSKLTVDKSRWQQGNVFSCSVMHEALHNHYTQKSLSLSPGK

SEQ ID NO: 608 - protein, 458 aa, Artificial Sequence
  source: /note="Description of Artificial Sequence: Synthetic polypeptide"
QMQVVQSGAEVKKPGASVKVSCKASGYTFTGYYMHWVRQAPGQGLEWMGWINPNSGGTNYAQKFQGRVTMTRDTSISTAYMELSRLRSDDTAVYYCARGGDYVFGTYRPHYYYGMDVWGQGTTVTVSSASTKGPSVFPLAPSSKSTSGGTAALGCLVKDYFPEPVTVSWNSGALTSGVHTFPAVLQSSGLYSLSSVVTVPSSSLGTQTYICNVNHKPSNTKVDKKVEPKSCDKTHTCPPCPAPELLGGPSVFLFPPKPKDTLMISRTPEVTCVVVDVSHEDPEVKFNWYVDGVEVHNAKTKPCEEQYGSTYRCVSVLTVLHQDWLNGKEYKCKVSNKALPAPIEKTISKAKGQPREPQVYTLPPSREEMTKNQVSLTCLVKGFYPSDIAVEWESNGQPENNYKTTPPVLDSDGSFFLYSKLTVDKSRWQQGNVFSCSVMHEALHNHYTQKSLSLSPGK

SEQ ID NO: 609 - protein, 451 aa, Artificial Sequence; identical to SEQ ID NO: 509
  source: /note="Description of Artificial Sequence: Synthetic polypeptide"

SEQ ID NO: 610 - protein, 451 aa, Artificial Sequence; identical to SEQ ID NO: 491
  source: /note="Description of Artificial Sequence: Synthetic polypeptide"

SEQ ID NO: 611 - protein, 458 aa, Artificial Sequence; identical to SEQ ID NO: 472
  source: /note="Description of Artificial Sequence: Synthetic polypeptide"

SEQ ID NO: 612 - protein, 451 aa, Artificial Sequence
  source: /note="Description of Artificial Sequence: Synthetic polypeptide"
QVQLVESGGGVVQPGRSLRLSCTASGFTFSSYGIHWVRQAPGKGLEWVAVIWYDGSNKFHADSVKGRFTISRDNSKNTLYLQMNSLRAEDSAMYFCARGKVAGMPEAFEIWGQGTKVTVSSASTKGPSVFPLAPSSKSTSGGTAALGCLVKDYFPEPVTVSWNSGALTSGVHTFPAVLQSSGLYSLSSVVTVPSSSLGTQTYICNVNHKPSNTKVDKKVEPKSCDKTHTCPPCPAPELLGGPSVFLFPPKPKDTLMISRTPEVTCVVVDVSHEDPEVKFNWYVDGVEVHNAKTKPCEEQYGSTYRCVSVLTVLHQDWLNGKEYKCKVSNKALPAPIEKTISKAKGQPREPQVYTLPPSREEMTKNQVSLTCLVKGFYPSDIAVEWESNGQPENNYKTTPPVLDSDGSFFLYSKLTVDKSRWQQGNVFSCSVMHEALHNHYTQKSLSLSPGK

SEQ ID NO: 613 - protein, 459 aa, Artificial Sequence
  source: /note="Description of Artificial Sequence: Synthetic polypeptide"
QMQLVQSGAEVKKPGASVKVSCKASGYTFTSYDINWVRQATGQGLEWMGWMNPNSGNTGYAQKFQGRVTMTRDTSISTAYMELSSLRSQDTAVYYCARGGDYVWGSYRPYYYYYGMDVWGQGTTVTVSSASTKGPSVFPLAPSSKSTSGGTAALGCLVKDYFPEPVTVSWNSGALTSGVHTFPAVLQSSGLYSLSSVVTVPSSSLGTQTYICNVNHKPSNTKVDKKVEPKSCDKTHTCPPCPAPELLGGPSVFLFPPKPKDTLMISRTPEVTCVVVDVSHEDPEVKFNWYVDGVEVHNAKTKPCEEQYGSTYRCVSVLTVLHQDWLNGKEYKCKVSNKALPAPIEKTISKAKGQPREPQVYTLPPSREEMTKNQVSLTCLVKGFYPSDIAVEWESNGQPENNYKTTPPVLDSDGSFFLYSKLTVDKSRWQQGNVFSCSVMHEALHNHYTQKSLSLSPGK

SEQ ID NO: 614 - protein, 451 aa, Artificial Sequence
  source: /note="Description of Artificial Sequence: Synthetic polypeptide"
QVQLVESGGGVVQPGRSLRLSCAASGFTFSSYGIHWVRQAPGKGLEWVAVIWYDASNKFHADAVKGRFTISRDNSKNTLYLQMNSLRAEDSAMYFCARGKVAGMPEAFEIWGQGTKVTVSSASTKGPSVFPLAPSSKSTSGGTAALGCLVKDYFPEPVTVSWNSGALTSGVHTFPAVLQSSGLYSLSSVVTVPSSSLGTQTYICNVNHKPSNTKVDKKVEPKSCDKTHTCPPCPAPELLGGPSVFLFPPKPKDTLMISRTPEVTCVVVDVSHEDPEVKFNWYVDGVEVHNAKTKPCEEQYGSTYRCVSVLTVLHQDWLNGKEYKCKVSNKALPAPIEKTISKAKGQPREPQVYTLPPSREEMTKNQVSLTCLVKGFYPSDIAVEWESNGQPENNYKTTPPVLDSDGSFFLYSKLTVDKSRWQQGNVFSCSVMHEALHNHYTQKSLSLSPGK

SEQ ID NO: 615 - protein, 451 aa, Artificial Sequence
  source: /note="Description of Artificial Sequence: Synthetic polypeptide"
QVQLVESGGGVVQPGRSLRLSCTASGFTFSSYGIHWVRQAPGKGLEWVAVIWYDASNKFHADAVKGRFTISRDNSKNTLYLQMNSLRAEDSAMYFCARGKVAGMPEAFEIWGQGTKVTVSSASTKGPSVFPLAPSSKSTSGGTAALGCLVKDYFPEPVTVSWNSGALTSGVHTFPAVLQSSGLYSLSSVVTVPSSSLGTQTYICNVNHKPSNTKVDKKVEPKSCDKTHTCPPCPAPELLGGPSVFLFPPKPKDTLMISRTPEVTCVVVDVSHEDPEVKFNWYVDGVEVHNAKTKPCEEQYGSTYRCVSVLTVLHQDWLNGKEYKCKVSNKALPAPIEKTISKAKGQPREPQVYTLPPSREEMTKNQVSLTCLVKGFYPSDIAVEWESNGQPENNYKTTPPVLDSDGSFFLYSKLTVDKSRWQQGNVFSCSVMHEALHNHYTQKSLSLSPGK

SEQ ID NO: 616 - protein, 451 aa, Artificial Sequence; identical to SEQ ID NO: 614
  source: /note="Description of Artificial Sequence: Synthetic polypeptide"

SEQ ID NO: 617 - protein, 451 aa, Artificial Sequence
  source: /note="Description of Artificial Sequence: Synthetic polypeptide"
QVQLVESGGGVVQPGRSLRLSCAASGFTFSSYGIHWVRQAPGKGLEWVAVIWYDASNKFHADAVKGRFTISRDNSKNTLYLQMNSLRAEDSAMYFCARGKVAGMPEAFEIWGQGTLVTVSSASTKGPSVFPLAPSSKSTSGGTAALGCLVKDYFPEPVTVSWNSGALTSGVHTFPAVLQSSGLYSLSSVVTVPSSSLGTQTYICNVNHKPSNTKVDKKVEPKSCDKTHTCPPCPAPELLGGPSVFLFPPKPKDTLMISRTPEVTCVVVDVSHEDPEVKFNWYVDGVEVHNAKTKPCEEQYGSTYRCVSVLTVLHQDWLNGKEYKCKVSNKALPAPIEKTISKAKGQPREPQVYTLPPSREEMTKNQVSLTCLVKGFYPSDIAVEWESNGQPENNYKTTPPVLDSDGSFFLYSKLTVDKSRWQQGNVFSCSVMHEALHNHYTQKSLSLSPGK

SEQ ID NO: 618 - protein, 451 aa, Artificial Sequence
  source: /note="Description of Artificial Sequence: Synthetic polypeptide"
QVQLVESGGGVVQPGRSLRLSCAASGFTFSSYGIHWVRQAPGKGLEWVAVIWYDASNKFHADSVKGRFTISRDNSKNTLYLQMNSLRAEDSAMYFCARGKVAGMPEAFEIWGQGTKVTVSSASTKGPSVFPLAPSSKSTSGGTAALGCLVKDYFPEPVTVSWNSGALTSGVHTFPAVLQSSGLYSLSSVVTVPSSSLGTQTYICNVNHKPSNTKVDKKVEPKSCDKTHTCPPCPAPELLGGPSVFLFPPKPKDTLMISRTPEVTCVVVDVSHEDPEVKFNWYVDGVEVHNAKTKPCEEQYGSTYRCVSVLTVLHQDWLNGKEYKCKVSNKALPAPIEKTISKAKGQPREPQVYTLPPSREEMTKNQVSLTCLVKGFYPSDIAVEWESNGQPENNYKTTPPVLDSDGSFFLYSKLTVDKSRWQQGNVFSCSVMHEALHNHYTQKSLSLSPGK

SEQ ID NO: 619 - protein, 451 aa, Artificial Sequence
  source: /note="Description of Artificial Sequence: Synthetic polypeptide"
QVQLVESGGGVVQPGRSLRLSCAASGFTFSSYGIHWVRQAPGKGLEWVAVIWYDGSNKFHADAVKGRFTISRDNSKNTLYLQMNSLRAEDSAMYFCARGKVAGMPEAFEIWGQGTKVTVSSASTKGPSVFPLAPSSKSTSGGTAALGCLVKDYFPEPVTVSWNSGALTSGVHTFPAVLQSSGLYSLSSVVTVPSSSLGTQTYICNVNHKPSNTKVDKKVEPKSCDKTHTCPPCPAPELLGGPSVFLFPPKPKDTLMISRTPEVTCVVVDVSHEDPEVKFNWYVDGVEVHNAKTKPCEEQYGSTYRCVSVLTVLHQDWLNGKEYKCKVSNKALPAPIEKTISKAKGQPREPQVYTLPPSREEMTKNQVSLTCLVKGFYPSDIAVEWESNGQPENNYKTTPPVLDSDGSFFLYSKLTVDKSRWQQGNVFSCSVMHEALHNHYTQKSLSLSPGK

SEQ ID NO: 620 - protein, 459 aa, Artificial Sequence
  source: /note="Description of Artificial Sequence: Synthetic polypeptide"
QMQLVQSGAEVKKPGASVKVSCKASGYTFTSYDINWVRQATGQGLEWMGWMNPNSGGTGYAQKFQGRVTMTRDTSISTAYMELSSLRSQDTAVYYCARGGDYVWGSYRPYYYYYGMDVWGQGTTVTVSSASTKGPSVFPLAPSSKSTSGGTAALGCLVKDYFPEPVTVSWNSGALTSGVHTFPAVLQSSGLYSLSSVVTVPSSSLGTQTYICNVNHKPSNTKVDKKVEPKSCDKTHTCPPCPAPELLGGPSVFLFPPKPKDTLMISRTPEVTCVVVDVSHEDPEVKFNWYVDGVEVHNAKTKPCEEQYGSTYRCVSVLTVLHQDWLNGKEYKCKVSNKALPAPIEKTISKAKGQPREPQVYTLPPSREEMTKNQVSLTCLVKGFYPSDIAVEWESNGQPENNYKTTPPVLDSDGSFFLYSKLTVDKSRWQQGNVFSCSVMHEALHNHYTQKSLSLSPGK

SEQ ID NO: 621 - protein, 459 aa, Artificial Sequence; identical to SEQ ID NO: 613
  source: /note="Description of Artificial Sequence: Synthetic polypeptide"

SEQ ID NO: 622 - protein, 459 aa, Artificial Sequence; identical to SEQ ID NO: 620
  source: /note="Description of Artificial Sequence: Synthetic polypeptide"

SEQ ID NO: 623 - protein, 459 aa, Artificial Sequence
  source: /note="Description of Artificial Sequence: Synthetic polypeptide"
QMQLVQSGAEVKKPGASVKVSCKASGYTFTSYDINWVRQAPGQGLEWMGWMNPNSGGTGYAQKFQGRVTMTRDTSISTAYMELSSLRSDDTAVYYCARGGDYVWGSYRPYYYYYGMDVWGQGTTVTVSSASTKGPSVFPLAPSSKSTSGGTAALGCLVKDYFPEPVTVSWNSGALTSGVHTFPAVLQSSGLYSLSSVVTVPSSSLGTQTYICNVNHKPSNTKVDKKVEPKSCDKTHTCPPCPAPELLGGPSVFLFPPKPKDTLMISRTPEVTCVVVDVSHEDPEVKFNWYVDGVEVHNAKTKPCEEQYGSTYRCVSVLTVLHQDWLNGKEYKCKVSNKALPAPIEKTISKAKGQPREPQVYTLPPSREEMTKNQVSLTCLVKGFYPSDIAVEWESNGQPENNYKTTPPVLDSDGSFFLYSKLTVDKSRWQQGNVFSCSVMHEALHNHYTQKSLSLSPGK

SEQ ID NO: 624 - protein, 459 aa, Artificial Sequence; identical to SEQ ID NO: 620
  source: /note="Description of Artificial Sequence: Synthetic polypeptide"

SEQ ID NO: 625 - protein, 459 aa, Artificial Sequence
  source: /note="Description of Artificial Sequence: Synthetic polypeptide"
QMQLVQSGAEVKKPGASVKVSCKASGYTFTSYDINWVRQAPGQGLEWMGWMNPNSGNTGYAQKFQGRVTMTRDTSISTAYMELSSLRSDDTAVYYCARGGDYVWGSYRPYYYYYGMDVWGQGTTVTVSSASTKGPSVFPLAPSSKSTSGGTAALGCLVKDYFPEPVTVSWNSGALTSGVHTFPAVLQSSGLYSLSSVVTVPSSSLGTQTYICNVNHKPSNTKVDKKVEPKSCDKTHTCPPCPAPELLGGPSVFLFPPKPKDTLMISRTPEVTCVVVDVSHEDPEVKFNWYVDGVEVHNAKTKPCEEQYGSTYRCVSVLTVLHQDWLNGKEYKCKVSNKALPAPIEKTISKAKGQPREPQVYTLPPSREEMTKNQVSLTCLVKGFYPSDIAVEWESNGQPENNYKTTPPVLDSDGSFFLYSKLTVDKSRWQQGNVFSCSVMHEALHNHYTQKSLSLSPGK

SEQ ID NO: 626 - protein, 459 aa, Artificial Sequence
  source: /note="Description of Artificial Sequence: Synthetic polypeptide"
QMQLVQSGAEVKKPGASVKVSCKASGYTFTSYDINWVRQATGQGLEWMGWMNPNSGGTGYAQKFQGRVTMTRDTSISTAYMELSSLRSQDTAVYYCARGGDYVFGSYRPYYYYYGMDVWGQGTTVTVSSASTKGPSVFPLAPSSKSTSGGTAALGCLVKDYFPEPVTVSWNSGALTSGVHTFPAVLQSSGLYSLSSVVTVPSSSLGTQTYICNVNHKPSNTKVDKKVEPKSCDKTHTCPPCPAPELLGGPSVFLFPPKPKDTLMISRTPEVTCVVVDVSHEDPEVKFNWYVDGVEVHNAKTKPCEEQYGSTYRCVSVLTVLHQDWLNGKEYKCKVSNKALPAPIEKTISKAKGQPREPQVYTLPPSREEMTKNQVSLTCLVKGFYPSDIAVEWESNGQPENNYKTTPPVLDSDGSFFLYSKLTVDKSRWQQGNVFSCSVMHEALHNHYTQKSLSLSPGK

SEQ ID NO: 627 - protein, 459 aa, Artificial Sequence
  source: /note="Description of Artificial Sequence: Synthetic polypeptide"
QMQLVQSGAEVKKPGASVKVSCKASGYTFTSYDINWVRQAPGQGLEWMGWMNPNSGGTGYAQKFQGRVTMTRDTSISTAYMELSSLRSDDTAVYYCARGGDYVFGSYRPYYYYYGMDVWGQGTTVTVSSASTKGPSVFPLAPSSKSTSGGTAALGCLVKDYFPEPVTVSWNSGALTSGVHTFPAVLQSSGLYSLSSVVTVPSSSLGTQTYICNVNHKPSNTKVDKKVEPKSCDKTHTCPPCPAPELLGGPSVFLFPPKPKDTLMISRTPEVTCVVVDVSHEDPEVKFNWYVDGVEVHNAKTKPCEEQYGSTYRCVSVLTVLHQDWLNGKEYKCKVSNKALPAPIEKTISKAKGQPREPQVYTLPPSREEMTKNQVSLTCLVKGFYPSDIAVEWESNGQPENNYKTTPPVLDSDGSFFLYSKLTVDKSRWQQGNVFSCSVMHEALHNHYTQKSLSLSPGK

SEQ ID NO: 628 - protein, 451 aa, Artificial Sequence; identical to SEQ ID NO: 617
  source: /note="Description of Artificial Sequence: Synthetic polypeptide"

SEQ ID NO: 629 - protein, 13 aa, Artificial Sequence
  source: /note="Description of Artificial Sequence: Synthetic peptide"
SGSSSNIGSNTVN

SEQ ID NO: 630 - protein, 11 aa, Artificial Sequence
  source: /note="Description of Artificial Sequence: Synthetic peptide"
RASQDIRDYLG

SEQ ID NO: 631 - protein, 11 aa, Artificial Sequence
  source: /note="Description of Artificial Sequence: Synthetic peptide"
RASQDIRDYLG

SEQ ID NO: 632 - protein, 11 aa, Artificial Sequence
  source: /note="Description of Artificial Sequence: Synthetic peptide"
QASQDISNYLN

SEQ ID NO: 633 - protein, 17 aa, Artificial Sequence
  source: /note="Description of Artificial Sequence: Synthetic peptide"
KSSQSVLSSSNNKNYIA

SEQ ID NO: 634 - protein, 17 aa, Artificial Sequence
  source: /note="Description of Artificial Sequence: Synthetic peptide"
KSSQSVLSSSNNKNYIA

SEQ ID NO: 635 - protein, 17 aa, Artificial Sequence
  source: /note="Description of Artificial Sequence: Synthetic peptide"
KSSQSVLSSSNNKNYLA

SEQ ID NO: 636 - protein, 17 aa, Artificial Sequence
  source: /note="Description of Artificial Sequence: Synthetic peptide"
KSSQSVLSSSNNKNYLA

SEQ ID NO: 637 - protein, 12 aa, Artificial Sequence
  source: /note="Description of Artificial Sequence: Synthetic peptide"
RASQSISYSYLA

SEQ ID NO: 638 - protein, 11 aa, Artificial Sequence
  source: /note="Description of Artificial Sequence: Synthetic peptide"
RASQSVSSNLA

SEQ ID NO: 639 - protein, 11 aa, Artificial Sequence
  source: /note="Description of Artificial Sequence: Synthetic peptide"
RASQGIRNELG

SEQ ID NO: 640 - protein, 11 aa, Artificial Sequence
  source: /note="Description of Artificial Sequence: Synthetic peptide"
QASQDITNYLN

SEQ ID NO: 641 - protein, 11 aa, Artificial Sequence
  source: /note="Description of Artificial Sequence: Synthetic peptide"
RASQGLIIWLA

SEQ ID NO: 642 - protein, 11 aa, Artificial Sequence
  source: /note="Description of Artificial Sequence: Synthetic peptide"
RASQGLIIWLA

SEQ ID NO: 643 - protein, 11 aa, Artificial Sequence
  source: /note="Description of Artificial Sequence: Synthetic peptide"
RASQGIRNELG

SEQ ID NO: 644 - protein, 11 aa, Artificial Sequence
  source: /note="Description of Artificial Sequence: Synthetic peptide"
RASQGIRNELG

SEQ ID NO: 645 - protein, 11 aa, Artificial Sequence
  source: /note="Description of Artificial Sequence: Synthetic peptide"
RASQGIRNELG

SEQ ID NO: 646 - protein, 11 aa, Artificial Sequence
  source: /note="Description of Artificial Sequence: Synthetic peptide"
RASQGIRNELG

SEQ ID NO: 647 - protein, 11 aa, Artificial Sequence
  source: /note="Description of Artificial Sequence: Synthetic peptide"
RASQGIRNELG

SEQ ID NO: 648 - protein, 11 aa, Artificial Sequence
  source: /note="Description of Artificial Sequence: Synthetic peptide"
RASQGIRNELG

SEQ ID NO: 649 - protein, 11 aa, Artificial Sequence
  source: /note="Description of Artificial Sequence: Synthetic peptide"
RASQDIRDYLG

SEQ ID NO: 650 - protein, 11 aa, Artificial Sequence
  source: /note="Description of Artificial Sequence: Synthetic peptide"
RASQDIRDYLG

SEQ ID NO: 651 - protein, 11 aa, Artificial Sequence
  source: /note="Description of Artificial Sequence: Synthetic peptide"
RASQDIRDYLG

SEQ ID NO: 652 - protein, 11 aa, Artificial Sequence
  source: /note="Description of Artificial Sequence: Synthetic peptide"
RASQDIRDYLG

SEQ ID NO: 653 - protein, 11 aa, Artificial Sequence
  source: /note="Description of Artificial Sequence: Synthetic peptide"
RASQDIRDYLG

SEQ ID NO: 654 - protein, 11 aa, Artificial Sequence
  source: /note="Description of Artificial Sequence: Synthetic peptide"
RASQDIRDYLG

SEQ ID NO: 655 - protein, 11 aa, Artificial Sequence
  source: /note="Description of Artificial Sequence: Synthetic peptide"
RASQDIRDYLG

SEQ ID NO: 656 - protein, 11 aa, Artificial Sequence
  source: /note="Description of Artificial Sequence: Synthetic peptide"
RASQDLRNYLG

SEQ ID NO: 657 - protein, 11 aa, Artificial Sequence
  source: /note="Description of Artificial Sequence: Synthetic peptide"
RASQDLRNYLG

SEQ ID NO: 658 - protein, 11 aa, Artificial Sequence
  source: /note="Description of Artificial Sequence: Synthetic peptide"
RASQDLRNYLG

SEQ ID NO: 659 - protein, 11 aa, Artificial Sequence
  source: /note="Description of Artificial Sequence: Synthetic peptide"
RASQDLRNYLG

SEQ ID NO: 660 - protein, 11 aa, Artificial Sequence
  source: /note="Description of Artificial Sequence: Synthetic peptide"
RASQDLRNYLG

SEQ ID NO: 661 - protein, 11 aa, Artificial Sequence
  source: /note="Description of Artificial Sequence: Synthetic peptide"
RASQDLRNYLG

SEQ ID NO: 662 - protein, 11 aa, Artificial Sequence
  source: /note="Description of Artificial Sequence: Synthetic peptide"
RASQDLRNYLG

SEQ ID NO: 663 - protein, 11 aa, Artificial Sequence
  source: /note="Description of Artificial Sequence: Synthetic peptide"
RASQDLRNYLG

SEQ ID NO: 664 - protein, 11 aa, Artificial Sequence
  source: /note="Description of Artificial Sequence: Synthetic peptide"
RASQDLRNYLG

SEQ ID NO: 665 - protein, 11 aa, Artificial Sequence
  source: /note="Description of Artificial Sequence: Synthetic peptide"
RASQDLRNYLG

SEQ ID NO: 666 - protein, 11 aa, Artificial Sequence
  source: /note="Description of Artificial Sequence: Synthetic peptide"
RASQDLRNYLG

SEQ ID NO: 667 - protein, 11 aa, Artificial Sequence
  source: /note="Description of Artificial Sequence: Synthetic peptide"
RASQDLRNYLG

SEQ ID NO: 668 - protein, 11 aa, Artificial Sequence
  source: /note="Description of Artificial Sequence: Synthetic peptide"
QASQDISNYLN

SEQ ID NO: 669 - protein, 11 aa, Artificial Sequence
  source: /note="Description of Artificial Sequence: Synthetic peptide"
QASQDISNYLN

SEQ ID NO: 670 - protein, 11 aa, Artificial Sequence
  source: /note="Description of Artificial Sequence: Synthetic peptide"
QASQDISNYLN

SEQ ID NO: 671 - protein, 11 aa, Artificial Sequence
  source: /note="Description of Artificial Sequence: Synthetic peptide"
QASQDISNYLN

SEQ ID NO: 672 - protein, 11 aa, Artificial Sequence
  source: /note="Description of Artificial Sequence: Synthetic peptide"
QASQDISNYLN

SEQ ID NO: 673 - protein, 11 aa, Artificial Sequence
  source: /note="Description of Artificial Sequence: Synthetic peptide"
QASQDISNYLN

SEQ ID NO: 674 - protein, 11 aa, Artificial Sequence
  source: /note="Description of Artificial Sequence: Synthetic peptide"
QASQDISNYLN

SEQ ID NO: 675 - protein, 11 aa, Artificial Sequence
  source: /note="Description of Artificial Sequence: Synthetic peptide"
QASQDISNYLN

SEQ ID NO: 676 - protein, 11 aa, Artificial Sequence
  source: /note="Description of Artificial Sequence: Synthetic peptide"
QASQDISNYLN

SEQ ID NO: 677 - protein, 11 aa, Artificial Sequence
  source: /note="Description of Artificial Sequence: Synthetic peptide"
RASQDIRDYLG

SEQ ID NO: 678 - protein, 11 aa, Artificial Sequence
  source: /note="Description of Artificial Sequence: Synthetic peptide"
RASQDIRDYLG

SEQ ID NO: 679 - protein, 11 aa, Artificial Sequence
  source: /note="Description of Artificial Sequence: Synthetic peptide"
RASQDIRDYLG

SEQ ID NO: 680 - protein, 11 aa, Artificial Sequence
  source: /note="Description of Artificial Sequence: Synthetic peptide"
RASQDIRDYLG

SEQ ID NO: 681 - protein, 11 aa, Artificial Sequence
  source: /note="Description of Artificial Sequence: Synthetic peptide"
RASQDIRDYLG

SEQ ID NO: 682 - protein, 11 aa, Artificial Sequence
  source: /note="Description of Artificial Sequence: Synthetic peptide"
RASQDIRDYLG

SEQ ID NO: 683 - protein, 11 aa, Artificial Sequence
  source: /note="Description of Artificial Sequence: Synthetic peptide"
RASQDIRDYLG

SEQ ID NO: 684 - protein, 11 aa, Artificial Sequence
  source: /note="Description of Artificial Sequence: Synthetic peptide"
QASQDITNYLN

SEQ ID NO: 685 - protein, 11 aa, Artificial Sequence
  source: /note="Description of Artificial Sequence: Synthetic peptide"
QASQDITNYLN

SEQ ID NO: 686 - protein, 11 aa, Artificial Sequence
  source: /note="Description of Artificial Sequence: Synthetic peptide"
QASQDITNYLN

SEQ ID NO: 687 - protein, 11 aa, Artificial Sequence
  source: /note="Description of Artificial Sequence: Synthetic peptide"
QASQDITNYLN

SEQ ID NO: 688 - protein, 11 aa, Artificial Sequence
  source: /note="Description of Artificial Sequence: Synthetic peptide"
QASQDITNYLN

SEQ ID NO: 689 - protein, 11 aa, Artificial Sequence
  source: /note="Description of Artificial Sequence: Synthetic peptide"
QASQDITNYLN

SEQ ID NO: 690 - protein, 11 aa, Artificial Sequence
  source: /note="Description of Artificial Sequence: Synthetic peptide"
QASQDITNYLN

SEQ ID NO: 691 - protein, 11 aa, Artificial Sequence
  source: /note="Description of Artificial Sequence: Synthetic peptide"
QASQDITNYLN

SEQ ID NO: 692 - protein, 11 aa, Artificial Sequence
  source: /note="Description of Artificial Sequence: Synthetic peptide"
QASQDITNYLN

SEQ ID NO: 693 - protein, 11 aa, Artificial Sequence
  source: /note="Description of Artificial Sequence: Synthetic peptide"
QASQDITNYLN

SEQ ID NO: 694 - protein, 11 aa, Artificial Sequence
  source: /note="Description of Artificial Sequence: Synthetic peptide"
QASQDITNYLN

SEQ ID NO: 695 - protein, 12 aa, Artificial Sequence
  source: /note="Description of Artificial Sequence: Synthetic peptide"
RASQIFTSTYLA

SEQ ID NO: 696 - protein, 12 aa, Artificial Sequence
  source: /note="Description of Artificial Sequence: Synthetic peptide"
RASQIFTSTYLA

SEQ ID NO: 697 - protein, 12 aa, Artificial Sequence
  source: /note="Description of Artificial Sequence: Synthetic peptide"
RASQIFTSTYLA

SEQ ID NO: 698 - protein, 12 aa, Artificial Sequence
  source: /note="Description of Artificial Sequence: Synthetic peptide"
RASQIFTSTYLA

SEQ ID NO: 699 - protein, 11 aa, Artificial Sequence
  source: /note="Description of Artificial Sequence: Synthetic peptide"
RASQSVSSNLA

SEQ ID NO: 700 - protein, 11 aa, Artificial Sequence
  source: /note="Description of Artificial Sequence: Synthetic peptide"
RASQSVSSNLA

SEQ ID NO: 701 - protein, 11 aa, Artificial Sequence
  source: /note="Description of Artificial Sequence: Synthetic peptide"
RASQSVSSNLA

SEQ ID NO: 702 - protein, 11 aa, Artificial Sequence
  source: /note="Description of Artificial Sequence: Synthetic peptide"
RASQSVSSNLA

SEQ ID NO: 703 - protein, 11 aa, Artificial Sequence
  source: /note="Description of Artificial Sequence: Synthetic peptide"
RASQSVSSNLA

SEQ ID NO: 704 - protein, 11 aa, Artificial Sequence
  source: /note="Description of Artificial Sequence: Synthetic peptide"
RASQSVSSNLA

SEQ ID NO: 705 - protein, 11 aa, Artificial Sequence
  source: /note="Description of Artificial Sequence: Synthetic peptide"
RASQSVSSNLA

SEQ ID NO: 706 - protein, 11 aa, Artificial Sequence
  source: /note="Description of Artificial Sequence: Synthetic peptide"
RASQSVSSNLA

SEQ ID NO: 707 - protein, 12 aa, Artificial Sequence
  source: /note="Description of Artificial Sequence: Synthetic peptide"
RASQSISYSYLA

SEQ ID NO: 708 - protein, 12 aa, Artificial Sequence
  source: /note="Description of Artificial Sequence: Synthetic peptide"
RASQSISYSYLA

SEQ ID NO: 709 - protein, 12 aa, Artificial Sequence
  source: /note="Description of Artificial Sequence: Synthetic peptide"
RASQSISYSYLA

SEQ ID NO: 710 - protein, 12 aa, Artificial Sequence
  source: /note="Description of Artificial Sequence: Synthetic peptide"
RASQSISYSYLA

SEQ ID NO: 711 - protein, 12 aa, Artificial Sequence
  source: /note="Description of Artificial Sequence: Synthetic peptide"
RASQSISYSYLA

SEQ ID NO: 712 - protein, 12 aa, Artificial Sequence
  source: /note="Description of Artificial Sequence: Synthetic peptide"
RASQSISYSYLA

SEQ ID NO: 713 - protein, 12 aa, Artificial Sequence
  source: /note="Description of Artificial Sequence: Synthetic peptide"
RASQSISYSYLA

SEQ ID NO: 714 - protein, 17 aa, Artificial Sequence
  source: /note="Description of Artificial Sequence: Synthetic peptide"
KSSQSVLSSSNNKNYIA

SEQ ID NO: 715 - protein, 17 aa, Artificial Sequence
  source: /note="Description of Artificial Sequence: Synthetic peptide"
KSSQSVLSSSNNKNYIA

SEQ ID NO: 716 - protein, 17 aa, Artificial Sequence
  source: /note="Description of Artificial Sequence: Synthetic peptide"
KSSQSVLSSSNNKNYIA

SEQ ID NO: 717 - protein, 17 aa, Artificial Sequence
  source: /note="Description of Artificial Sequence: Synthetic peptide"
KSSQSVLSSSNNKNYIA

SEQ ID NO: 718 - protein, 17 aa, Artificial Sequence
  source: /note="Description of Artificial Sequence: Synthetic peptide"
KSSQSVLSSSNNKNYIA

SEQ ID NO: 719 - protein, 17 aa, Artificial Sequence
  source: /note="Description of Artificial Sequence: Synthetic peptide"
KSSQSVLSSSNNKNYIA

SEQ ID NO: 720 - protein, 17 aa, Artificial Sequence
  source: /note="Description of Artificial Sequence: Synthetic peptide"
KSSQSVLSSSNNKNYIA

SEQ ID NO: 721 - protein, 17 aa, Artificial Sequence
  source: /note="Description of Artificial Sequence: Synthetic peptide"
KSSQSVLSSSNNKNYIA

SEQ ID NO: 722 - protein, 17 aa, Artificial Sequence
  source: /note="Description of Artificial Sequence: Synthetic peptide"
KSSQSVLSSSNNKNYIA

SEQ ID NO: 723 - protein, 17 aa, Artificial Sequence
  source: /note="Description of Artificial Sequence: Synthetic peptide"
KSSQSVLSSSNNKNYIA

SEQ ID NO: 724 - protein, 17 aa, Artificial Sequence
  source: /note="Description of Artificial Sequence: Synthetic peptide"
KSSQSVLSSSNNKNYIA

SEQ ID NO: 725 - protein, 17 aa, Artificial Sequence
  source: /note="Description of Artificial Sequence: Synthetic peptide"
KSSQSVLSSSNNKNYLA

SEQ ID NO: 726 - protein, 17 aa, Artificial Sequence
  source: /note="Description of Artificial Sequence: Synthetic peptide"
KSSQSVLSSSNNKNYLA

SEQ ID NO: 727 - protein, 17 aa, Artificial Sequence
  source: /note="Description of Artificial Sequence: Synthetic peptide"
KSSQSVLSSSNNKNYLA

SEQ ID NO: 728 - protein, 17 aa, Artificial Sequence
  source: /note="Description of Artificial Sequence: Synthetic peptide"
KSSQSVLSSSNNKNYLA

SEQ ID NO: 729 - protein, 17 aa, Artificial Sequence
  source: /note="Description of Artificial Sequence: Synthetic peptide"
KSSQSVLSSSNNKNYLA

SEQ ID NO: 730 - protein, 17 aa, Artificial Sequence
  source: /note="Description of Artificial Sequence: Synthetic peptide"
KSSQSVLSSSNNKNYLA

SEQ ID NO: 731 - protein, 17 aa, Artificial Sequence
  source: /note="Description of Artificial Sequence: Synthetic peptide"
KSSQSVLSSSNNKNYLA

SEQ ID NO: 732 - protein, 17 aa, Artificial Sequence
  source: /note="Description of Artificial Sequence: Synthetic peptide"
KSSQSVLSSSNNKNYLA

SEQ ID NO: 733 - protein, 17 aa, Artificial Sequence
  source: /note="Description of Artificial Sequence: Synthetic peptide"
KSSQSVLSSSNNKNYLA

SEQ ID NO: 734 - protein, 17 aa, Artificial Sequence
  source: /note="Description of Artificial Sequence: Synthetic peptide"
KSSQSVLSSSNNKNYIA

SEQ ID NO: 735 - protein, 17 aa, Artificial Sequence
  source: /note="Description of Artificial Sequence: Synthetic peptide"
KSSQSVLSSSNNKNYIA

SEQ ID NO: 736 - protein, 17 aa, Artificial Sequence
  source: /note="Description of Artificial Sequence: Synthetic peptide"
KSSQSVLSSSNNKNYIA

SEQ ID NO: 737 - protein, 17 aa, Artificial Sequence
  source: /note="Description of Artificial Sequence: Synthetic peptide"
KSSQSVLSSSNNKNYIA

SEQ ID NO: 738 - protein, 17 aa, Artificial Sequence
  source: /note="Description of Artificial Sequence: Synthetic peptide"
KSSQSVLSSSNNKNYIA

SEQ ID NO: 739 - protein, 17 aa, Artificial Sequence
  source: /note="Description of Artificial Sequence: Synthetic peptide"
KSSQSVLSSSNNKNYLA

SEQ ID NO: 740 - protein, 17 aa, Artificial Sequence
  source: /note="Description of Artificial Sequence: Synthetic peptide"
KSSQSVLSSSNNKNYLA

SEQ ID NO: 741 - protein, 17 aa, Artificial Sequence
  source: /note="Description of Artificial Sequence: Synthetic peptide"
KSSQSVLSSSNNKNYLA

SEQ ID NO: 742 - protein, 17 aa, Artificial Sequence
  source: /note="Description of Artificial Sequence: Synthetic peptide"
KSSQSVLSSSNNKNYLA

SEQ ID NO: 743 - protein, 17 aa, Artificial Sequence
  source: /note="Description of Artificial Sequence: Synthetic peptide"
KSSQSVLSSSNNKNYLA

SEQ ID NO: 744 - protein, 17 aa, Artificial Sequence
  source: /note="Description of Artificial Sequence: Synthetic peptide"
KSSQSVLSSSNNKNYLA

SEQ ID NO: 745 - protein, 17 aa, Artificial Sequence
  source: /note="Description of Artificial Sequence: Synthetic peptide"
KSSQSVLSSSNNKNYLA

SEQ ID NO: 746 - protein, 17 aa, Artificial Sequence
  source: /note="Description of Artificial Sequence: Synthetic peptide"
KSSQSVLSSSNNKNYLA

SEQ ID NO: 747 - protein, 17 aa, Artificial Sequence
  source: /note="Description of Artificial Sequence: Synthetic peptide"
KSSQSVLSSSNNKNYLA

SEQ ID NO: 748 - protein, 17 aa, Artificial Sequence
  source: /note="Description of Artificial Sequence: Synthetic peptide"
KSSQSVLSSSNNKNYLA

SEQ ID NO: 749 - protein, 17 aa, Artificial Sequence
  source: /note="Description of Artificial Sequence: Synthetic peptide"
KSSQSVLSSSNNKNYLA

SEQ ID NO: 750 - protein, 17 aa, Artificial Sequence
  source: /note="Description of Artificial Sequence: Synthetic peptide"
KSSQSVLSSSNNKNYLA

SEQ ID NO: 751 - protein, 17 aa, Artificial Sequence
  source: /note="Description of Artificial Sequence: Synthetic peptide"
KSSQSVLSSSNNKNYLA

SEQ ID NO: 752 - protein, 13 aa, Artificial Sequence
  source: /note="Description of Artificial Sequence: Synthetic peptide"
SGSSSNIGSQTVN

SEQ ID NO: 753 - protein, 13 aa, Artificial Sequence
  source: /note="Description of Artificial Sequence: Synthetic peptide"
SGSSSNIGSQTVN

SEQ ID NO: 754 - protein, 13 aa, Artificial Sequence
  source: /note="Description of Artificial Sequence: Synthetic peptide"
SGSSSNIGSNYVN

SEQ ID NO: 755 - protein, 13 aa, Artificial Sequence
  source: /note="Description of Artificial Sequence: Synthetic peptide"
SGSSSNIGSNYVN

SEQ ID NO: 756 - protein, 13 aa, Artificial Sequence
  source: /note="Description of Artificial Sequence: Synthetic peptide"
SGSSSNIGSQTVN

SEQ ID NO: 757 - protein, 13 aa, Artificial Sequence
  source: /note="Description of Artificial Sequence: Synthetic peptide"
SGSSSNIGSNYVN

SEQ ID NO: 758 - protein, 13 aa, Artificial Sequence
  source: /note="Description of Artificial Sequence: Synthetic peptide"
SGSSSNIGSNTVN

SEQ ID NO: 759 - protein, 13 aa, Artificial Sequence
  source: /note="Description of Artificial Sequence: Synthetic peptide"
SGSSSNIGSNTVN

SEQ ID NO: 760 - protein, 13 aa, Artificial Sequence
  source: /note="Description of Artificial Sequence: Synthetic peptide"
SGSSSNIGSNTVN

SEQ ID NO: 761 - protein, 13 aa, Artificial Sequence
  source: /note="Description of Artificial Sequence: Synthetic peptide"
SGSSSNIGSNTVN

SEQ ID NO: 762 - protein, 13 aa, Artificial Sequence
  source: /note="Description of Artificial Sequence: Synthetic peptide"
SGSSSNIGSNTVN

SEQ ID NO: 763 - protein, 13 aa, Artificial Sequence
  source: /note="Description of Artificial Sequence: Synthetic peptide"
SGSSSNIGSNYVN

SEQ ID NO: 764 - protein, 13 aa, Artificial Sequence
  source: /note="Description of Artificial Sequence: Synthetic peptide"
SGSSSNIGSNYVN

SEQ ID NO: 765 - protein, 13 aa, Artificial Sequence
  source: /note="Description of Artificial Sequence: Synthetic peptide"
SGSSSNIGSQTVN

SEQ ID NO: 766 - protein, 11 aa, Artificial Sequence
  source: /note="Description of Artificial Sequence: Synthetic peptide"
RASQDLRNYLG

SEQ ID NO: 767 - protein, 11 aa, Artificial Sequence
  source: /note="Description of Artificial Sequence: Synthetic peptide"
RASQDIRDYLG

SEQ ID NO: 768 - protein, 13 aa, Artificial Sequence
  source: /note="Description of Artificial Sequence: Synthetic peptide"
SGSSSNIGSNTVN

SEQ ID NO: 769 - protein, 11 aa, Artificial Sequence
  source: /note="Description of Artificial Sequence: Synthetic peptide"
RASQTISRFLN

SEQ ID NO: 770 - protein, 13 aa, Artificial Sequence
  source: /note="Description of Artificial Sequence: Synthetic peptide"
SGSSSNIGNNYVS

SEQ ID NO: 771 - protein, 11 aa, Artificial Sequence
  source: /note="Description of Artificial Sequence: Synthetic peptide"
RASQTISRFLN

SEQ ID NO: 772 - protein, 11 aa, Artificial Sequence
  source: /note="Description of Artificial Sequence: Synthetic peptide"
RASQTISRFLN

SEQ ID NO: 773 - protein, 11 aa, Artificial Sequence
  source: /note="Description of Artificial Sequence: Synthetic peptide"
RASQTISRFLN

SEQ ID NO: 774 - protein, 11 aa, Artificial Sequence
  source: /note="Description of Artificial Sequence: Synthetic peptide"
RASQTISRFLN

SEQ ID NO: 775 - protein, 11 aa, Artificial Sequence
  source: /note="Description of Artificial Sequence: Synthetic peptide"
RASQTISRFLN

SEQ ID NO: 776 - protein, 11 aa, Artificial Sequence
  source: /note="Description of Artificial Sequence: Synthetic peptide"
RASQTISRFLN

SEQ ID NO: 777 - protein, 13 aa, Artificial Sequence
  source: /note="Description of Artificial Sequence: Synthetic peptide"
SGSSSNIGNNYVS

SEQ ID NO: 778 - protein, 13 aa, Artificial Sequence
  source: /note="Description of Artificial Sequence: Synthetic peptide"
SGSSSNIGNNYVS

SEQ ID NO: 779 - protein, 13 aa, Artificial Sequence
  source: /note="Description of Artificial Sequence: Synthetic peptide"
SGSSSNIGNNYVS

SEQ ID NO: 780 - protein, 13 aa, Artificial Sequence
  source: /note="Description of Artificial Sequence: Synthetic peptide"
SGSSSNIGNNYVS

SEQ ID NO: 781 - protein, 13 aa, Artificial Sequence
  source: /note="Description of Artificial Sequence: Synthetic peptide"
SGSSSNIGNNYVS

SEQ ID NO: 782 - protein, 13 aa, Artificial Sequence
  source: /note="Description of Artificial Sequence: Synthetic peptide"
SGSSSNIGNNYVS

SEQ ID NO: 783 - protein, 13 aa, Artificial Sequence
  source: /note="Description of Artificial Sequence: Synthetic peptide"
SGSSSNIGNNYVS

SEQ ID NO: 784 - protein, 13 aa, Artificial Sequence
  source: /note="Description of Artificial Sequence: Synthetic peptide"
SGSSSNIGNNYVS

SEQ ID NO: 785 - protein, 11 aa, Artificial Sequence
  source: /note="Description of Artificial Sequence: Synthetic peptide"
RASQTISRFLN

SEQ ID NO: 786 - protein, 7 aa, Artificial Sequence
  source: /note="Description of Artificial Sequence: Synthetic peptide"
TNNQRPS

SEQ ID NO: 787 - protein, 7 aa, Artificial Sequence
  source: /note="Description of Artificial Sequence: Synthetic peptide"
GASSLQS

SEQ ID NO: 788 - protein, 7 aa, Artificial Sequence
  source: /note="Description of Artificial Sequence: Synthetic peptide"
GASSLQS

SEQ ID NO: 789 - protein, 7 aa, Artificial Sequence
  source: /note="Description of Artificial Sequence: Synthetic peptide"
DASNLET

SEQ ID NO: 790 - protein, 7 aa, Artificial Sequence
  source: /note="Description of Artificial Sequence: Synthetic peptide"
WASTRES

SEQ ID NO: 791 - protein, 7 aa, Artificial Sequence
  source: /note="Description of Artificial Sequence: Synthetic peptide"
WASTRES

SEQ ID NO: 792 - protein, 7 aa, Artificial Sequence
  source: /note="Description of Artificial Sequence: Synthetic peptide"
WTSTRDS

SEQ ID NO: 793 - protein, 7 aa, Artificial Sequence
  source: /note="Description of Artificial Sequence: Synthetic peptide"
WTSTRDS

SEQ ID NO: 794 - protein, 7 aa, Artificial Sequence
  source: /note="Description of Artificial Sequence: Synthetic peptide"
GASSRAT

SEQ ID NO: 795 - protein, 7 aa, Artificial Sequence
  source: /note="Description of Artificial Sequence: Synthetic peptide"
GAATRAT

SEQ ID NO: 796 - protein, 7 aa, Artificial Sequence
  source: /note="Description of Artificial Sequence: Synthetic peptide"
GASSLQS

SEQ ID NO: 797 - protein, 7 aa, Artificial Sequence
  source: /note="Description of Artificial Sequence: Synthetic peptide"
DASNLEP

SEQ ID NO: 798 - protein, 7 aa, Artificial Sequence
  source: /note="Description of Artificial Sequence: Synthetic peptide"
AASSLQS

SEQ ID NO: 799 - protein, 7 aa, Artificial Sequence
  source: /note="Description of Artificial Sequence: Synthetic peptide"
AASSLQS

SEQ ID NO: 800 - protein, 7 aa, Artificial Sequence
  source: /note="Description of Artificial Sequence: Synthetic peptide"
GASSLQS

SEQ ID NO: 801 - protein, 7 aa, Artificial Sequence
  source: /note="Description of Artificial Sequence: Synthetic peptide"
GASSLQS

SEQ ID NO: 802 - protein, 7 aa, Artificial Sequence
  source: /note="Description of Artificial Sequence: Synthetic peptide"
GASSLQS

SEQ ID NO: 803 - protein, 7 aa, Artificial Sequence
  source: /note="Description of Artificial Sequence: Synthetic peptide"
GASSLQS

SEQ ID NO: 804 - protein, 7 aa, Artificial Sequence
  source: /note="Description of Artificial Sequence: Synthetic peptide"
GASSLQS

SEQ ID NO: 805 - protein, 7 aa, Artificial Sequence
  source: /note="Description of Artificial Sequence: Synthetic peptide"
GASSLQS

SEQ ID NO: 806 - protein, 7 aa, Artificial Sequence
  source: /note="Description of Artificial Sequence: Synthetic peptide"
GASSLQS

SEQ ID NO: 807 - protein, 7 aa, Artificial Sequence
  source: /note="Description of Artificial Sequence: Synthetic peptide"
GASSLQS

SEQ ID NO: 808 - protein, 7 aa, Artificial Sequence
  source: /note="Description of Artificial Sequence: Synthetic peptide"
GASSLQS

SEQ ID NO: 809 - protein, 7 aa, Artificial Sequence
  source: /note="Description of Artificial Sequence: Synthetic peptide"
GASSLQS

SEQ ID NO: 810 - protein, 7 aa, Artificial Sequence
  source: /note="Description of Artificial Sequence: Synthetic peptide"
GASSLQS

SEQ ID NO: 811 - protein, 7 aa, Artificial Sequence
  source: /note="Description of Artificial Sequence: Synthetic peptide"
GASSLQS

SEQ ID NO: 812 - protein, 7 aa, Artificial Sequence
  source: /note="Description of Artificial Sequence: Synthetic peptide"
GASSLQS

SEQ ID NO: 813 - protein, 7 aa, Artificial Sequence
  source: /note="Description of Artificial Sequence: Synthetic peptide"
GASSLQS

SEQ ID NO: 814 - protein, 7 aa, Artificial Sequence
  source: /note="Description of Artificial Sequence: Synthetic peptide"
GASSLQS

SEQ ID NO: 815 - protein, 7 aa, Artificial Sequence
  source: /note="Description of Artificial Sequence: Synthetic peptide"
GASSLQS

SEQ ID NO: 816 - protein, 7 aa, Artificial Sequence
  source: /note="Description of Artificial Sequence: Synthetic peptide"
GASSLQS

SEQ ID NO: 817 - protein, 7 aa, Artificial Sequence
  source: /note="Description of Artificial Sequence: Synthetic peptide"
GASSLQS

SEQ ID NO: 818 - protein, 7 aa, Artificial Sequence
  source: /note="Description of Artificial Sequence: Synthetic peptide"
GASSLQS

SEQ ID NO: 819 - protein, 7 aa, Artificial Sequence
  source: /note="Description of Artificial Sequence: Synthetic peptide"
GASSLQS

SEQ ID NO: 820 - protein, 7 aa, Artificial Sequence
  source: /note="Description of Artificial Sequence: Synthetic peptide"
GASSLQS

SEQ ID NO: 821 - protein, 7 aa, Artificial Sequence
  source: /note="Description of Artificial Sequence: Synthetic peptide"
GASSLQS

SEQ ID NO: 822 - protein, 7 aa, Artificial Sequence
  source: /note="Description of Artificial Sequence: Synthetic peptide"
GASSLQS

SEQ ID NO: 823 - protein, 7 aa, Artificial Sequence
  source: /note="Description of Artificial Sequence: Synthetic peptide"
GASSLQS

SEQ ID NO: 824 - protein, 7 aa, Artificial Sequence
  source: /note="Description of Artificial Sequence: Synthetic peptide"
GASSLQS

SEQ ID NO: 825 - protein, 7 aa, Artificial Sequence
  source: /note="Description of Artificial Sequence: Synthetic peptide"
DASNLET

SEQ ID NO: 826 - protein, 7 aa, Artificial Sequence
  source: /note="Description of Artificial Sequence: Synthetic peptide"
DASNLET

SEQ ID NO: 827 - protein, 7 aa, Artificial Sequence
  source: /note="Description of Artificial Sequence: Synthetic peptide"
DASNLET

SEQ ID NO: 828 - protein, 7 aa, Artificial Sequence
  source: /note="Description of Artificial Sequence: Synthetic peptide"
DASNLET

SEQ ID NO: 829 - protein, 7 aa, Artificial Sequence
  source: /note="Description of Artificial Sequence: Synthetic peptide"
DASNLET

SEQ ID NO: 830 - protein, 7 aa, Artificial Sequence
  source: /note="Description of Artificial Sequence: Synthetic peptide"
DASNLET

SEQ ID NO: 831 - protein, 7 aa, Artificial Sequence
  source: /note="Description of Artificial Sequence: Synthetic peptide"
DASNLET

SEQ ID NO: 832 - protein, 7 aa, Artificial Sequence
  source: /note="Description of Artificial Sequence: Synthetic peptide"
DASNLET

SEQ ID NO: 833 - protein, 7 aa, Artificial Sequence
  source: /note="Description of Artificial Sequence: Synthetic peptide"
DASNLET

SEQ ID NO: 834 - protein, 7 aa, Artificial Sequence
  source: /note="Description of Artificial Sequence: Synthetic peptide"
GASSLQS

SEQ ID NO: 835 - protein, 7 aa, Artificial Sequence
  source: /note="Description of Artificial Sequence: Synthetic peptide"
GASSLQS

SEQ ID NO: 836 - protein, 7 aa, Artificial Sequence
  source: /note="Description of Artificial Sequence: Synthetic peptide"
GASSLQS

SEQ ID NO: 837 - protein, 7 aa, Artificial Sequence
  source: /note="Description of Artificial Sequence: Synthetic peptide"
GASSLQS

SEQ ID NO: 838 - protein, 7 aa, Artificial Sequence
  source: /note="Description of Artificial Sequence: Synthetic peptide"
GASSLQS

SEQ ID NO: 839 - protein, 7 aa, Artificial Sequence
  source: /note="Description of Artificial Sequence: Synthetic peptide"
GASSLQS

SEQ ID NO: 840 - protein, 7 aa, Artificial Sequence
  source: /note="Description of Artificial Sequence: Synthetic peptide"
GASSLQS

SEQ ID NO: 841 - protein, 7 aa, Artificial Sequence
  source: /note="Description of Artificial Sequence: Synthetic peptide"
DASNLEP

SEQ ID NO: 842 - protein, 7 aa, Artificial Sequence
  source: /note="Description of Artificial Sequence: Synthetic peptide"
DASNLEP

SEQ ID NO: 843 - protein, 7 aa, Artificial Sequence
  source: /note="Description of Artificial Sequence: Synthetic peptide"
DASNLEP

SEQ ID NO: 844 - protein, 7 aa, Artificial Sequence
  source: /note="Description of Artificial Sequence: Synthetic peptide"
DASNLEP

SEQ ID NO: 845 - protein, 7 aa, Artificial Sequence
  source: /note="Description of Artificial Sequence: Synthetic peptide"
DASNLEP

SEQ ID NO: 846 - protein, 7 aa, Artificial Sequence
  source: /note="Description of Artificial Sequence: Synthetic peptide"
DASNLEP

SEQ ID NO: 847 - protein, 7 aa, Artificial Sequence
  source: /note="Description of Artificial Sequence: Synthetic peptide"
DASNLEP

SEQ ID NO: 848 - protein, 7 aa, Artificial Sequence
  source: /note="Description of Artificial Sequence: Synthetic peptide"
DASNLEP

SEQ ID NO: 849 - protein, 7 aa, Artificial Sequence
  source: /note="Description of Artificial Sequence: Synthetic peptide"
DASNLEP

SEQ ID NO: 850 - protein, 7 aa, Artificial Sequence
  source: /note="Description of Artificial Sequence: Synthetic peptide"
DASNLEP

SEQ ID NO: 851 - protein, 7 aa, Artificial Sequence
  source: /note="Description of Artificial Sequence: Synthetic peptide"
DASNLEP

SEQ ID NO: 852 - protein, 7 aa, Artificial Sequence
  source: /note="Description of Artificial Sequence: Synthetic peptide"
GASSRAT

SEQ ID NO: 853 - protein, 7 aa, Artificial Sequence
  source: /note="Description of Artificial Sequence: Synthetic peptide"
GASSRAT

SEQ ID NO: 854 - protein, 7 aa, Artificial Sequence
  source: /note="Description of Artificial Sequence: Synthetic peptide"
GASSRAT

SEQ ID NO: 855 - protein, 7 aa, Artificial Sequence
  source: /note="Description of Artificial Sequence: Synthetic peptide"
GASSRAT

SEQ ID NO: 856 - protein, 7 aa, Artificial Sequence
  source: /note="Description of Artificial Sequence: Synthetic peptide"
GAATRAT

SEQ ID NO: 857 - protein, 7 aa, Artificial Sequence
  source: /note="Description of Artificial Sequence: Synthetic peptide"
GAATRAT

SEQ ID NO: 858 - protein, 7 aa, Artificial Sequence
  source: /note="Description of Artificial Sequence: Synthetic peptide"
GAATRAT

SEQ ID NO: 859 - protein, 7 aa, Artificial Sequence
  source: /note="Description of Artificial Sequence: Synthetic peptide"
GAATRAT

SEQ ID NO: 860 - protein, 7 aa, Artificial Sequence
  source: /note="Description of Artificial Sequence: Synthetic peptide"
GAATRAT

SEQ ID NO: 861 - protein, 7 aa, Artificial Sequence
  source: /note="Description of Artificial Sequence: Synthetic peptide"
GAATRAT

SEQ ID NO: 862 - protein, 7 aa, Artificial Sequence
  source: /note="Description of Artificial Sequence: Synthetic peptide"
GAATRAT

SEQ ID NO: 863 - protein, 7 aa, Artificial Sequence
  source: /note="Description of Artificial Sequence: Synthetic peptide"
GAATRAT

SEQ ID NO: 864 - protein, 7 aa, Artificial Sequence
  source: /note="Description of Artificial Sequence: Synthetic peptide"
GASSRAT

SEQ ID NO: 865 - protein, 7 aa, Artificial Sequence
  source: /note="Description of Artificial Sequence: Synthetic peptide"
GASSRAT

SEQ ID NO: 866 - protein, 7 aa, Artificial Sequence
  source: /note="Description of Artificial Sequence: Synthetic peptide"
GASSRAT

SEQ ID NO: 867 - protein, 7 aa, Artificial Sequence
  source: /note="Description of Artificial Sequence: Synthetic peptide"
GASSRAT

SEQ ID NO: 868 - protein, 7 aa, Artificial Sequence
  source: /note="Description of Artificial Sequence: Synthetic peptide"
GASSRAT

SEQ ID NO: 869 - protein, 7 aa, Artificial Sequence
  source: /note="Description of Artificial Sequence: Synthetic peptide"
GASSRAT

SEQ ID NO: 870 - protein, 7 aa, Artificial Sequence
  source: /note="Description of Artificial Sequence: Synthetic peptide"
GASSRAT

SEQ ID NO: 871 - protein, 7 aa, Artificial Sequence
  source: /note="Description of Artificial Sequence: Synthetic peptide"
WASTRES

SEQ ID NO: 872 - protein, 7 aa, Artificial Sequence
  source: /note="Description of Artificial Sequence: Synthetic peptide"
WASTRES

SEQ ID NO: 873 - protein, 7 aa, Artificial Sequence
  source: /note="Description of Artificial Sequence: Synthetic peptide"
WASTRES

SEQ ID NO: 874 - protein, 7 aa, Artificial Sequence
  source: /note="Description of Artificial Sequence: Synthetic peptide"
WASTRES

SEQ ID NO: 875 - protein, 7 aa, Artificial Sequence
  source: /note="Description of Artificial Sequence: Synthetic peptide"
WASTRES

SEQ ID NO: 876 - protein, 7 aa, Artificial Sequence
  source: /note="Description of Artificial Sequence: Synthetic peptide"
WASTRES

SEQ ID NO: 877 - protein, 7 aa, Artificial Sequence
  source: /note="Description of Artificial Sequence: Synthetic peptide"
WASTRES

SEQ ID NO: 878 - protein, 7 aa, Artificial Sequence
  source: /note="Description of Artificial Sequence: Synthetic peptide"
WASTRES

SEQ ID NO: 879 - protein, 7 aa, Artificial Sequence
  source: /note="Description of Artificial Sequence: Synthetic peptide"
WASTRES

SEQ ID NO: 880 - protein, 7 aa, Artificial Sequence
  source: /note="Description of Artificial Sequence: Synthetic peptide"
WASTRES

SEQ ID NO: 881 - protein, 7 aa, Artificial Sequence
  source: /note="Description of Artificial Sequence: Synthetic peptide"
WASTRES

SEQ ID NO: 882 - protein, 7 aa, Artificial Sequence
  source: /note="Description of Artificial Sequence: Synthetic peptide"
WTSTRES

SEQ ID NO: 883 - protein, 7 aa, Artificial Sequence
  source: /note="Description of Artificial Sequence: Synthetic peptide"
WTSTRES

SEQ ID NO: 884 - protein, 7 aa, Artificial Sequence
  source: /note="Description of Artificial Sequence: Synthetic peptide"
WTSTRDS

SEQ ID NO: 885 - protein, 7 aa, Artificial Sequence
  source: /note="Description of Artificial Sequence: Synthetic peptide"
WTSTRES

SEQ ID NO: 886 - protein, 7 aa, Artificial Sequence
  source: /note="Description of Artificial Sequence: Synthetic peptide"
WTSTRES

SEQ ID NO: 887 - protein, 7 aa, Artificial Sequence
  source: /note="Description of Artificial Sequence: Synthetic peptide"
WTSTRDS

SEQ ID NO: 888 - protein, 7 aa, Artificial Sequence
  source: /note="Description of Artificial Sequence: Synthetic peptide"
WTSTRDS

SEQ ID NO: 889 - protein, 7 aa, Artificial Sequence
  source: /note="Description of Artificial Sequence: Synthetic peptide"
WTSTRES

SEQ ID NO: 890 - protein, 7 aa, Artificial Sequence
  source: /note="Description of Artificial Sequence: Synthetic peptide"
WTSTRES

SEQ ID NO: 891 - protein, 7 aa, Artificial Sequence
  source: /note="Description of Artificial Sequence: Synthetic peptide"
WASTRES

SEQ ID NO: 892 - protein, 7 aa, Artificial Sequence
  source: /note="Description of Artificial Sequence: Synthetic peptide"
WASTRES

SEQ ID NO: 893 - protein, 7 aa, Artificial Sequence
  source: /note="Description of Artificial Sequence: Synthetic peptide"
WASTRES

SEQ ID NO: 894 - protein, 7 aa, Artificial Sequence
  source: /note="Description of Artificial Sequence: Synthetic peptide"
WASTRES

SEQ ID NO: 895 - protein, 7 aa, Artificial Sequence
  source: /note="Description of Artificial Sequence: Synthetic peptide"
WASTRES

SEQ ID NO: 896 - protein, 7 aa, Artificial Sequence
  source: /note="Description of Artificial Sequence: Synthetic peptide"
WTSTRDS

SEQ ID NO: 897 - protein, 7 aa, Artificial Sequence
  source: /note="Description of Artificial Sequence: Synthetic peptide"
WTSTRDS

SEQ ID NO: 898 - protein, 7 aa, Artificial Sequence
  source: /note="Description of Artificial Sequence: Synthetic peptide"
WTSTRDS

SEQ ID NO: 899 - protein, 7 aa, Artificial Sequence
  source: /note="Description of Artificial Sequence: Synthetic peptide"
WTSTRDS

SEQ ID NO: 900 - protein, 7 aa, Artificial Sequence
  source: /note="Description of Artificial Sequence: Synthetic peptide"
WTSTRDS

SEQ ID NO: 901 - protein, 7 aa, Artificial Sequence
  source: /note="Description of Artificial Sequence: Synthetic peptide"
WTSTRDS

SEQ ID NO: 902 - protein, 7 aa, Artificial Sequence
  source: /note="Description of Artificial Sequence: Synthetic peptide"
WTSTRDS

SEQ ID NO: 903 - protein, 7 aa, Artificial Sequence
  source: /note="Description of Artificial Sequence: Synthetic peptide"
WTSTRES

SEQ ID NO: 904 - protein, 7 aa, Artificial Sequence
  source: /note="Description of Artificial Sequence: Synthetic peptide"
WTSTRES

SEQ ID NO: 905 - protein, 7 aa, Artificial Sequence
  source: /note="Description of Artificial Sequence: Synthetic peptide"
WTSTRES

SEQ ID NO: 906 - protein, 7 aa, Artificial Sequence
  source: /note="Description of Artificial Sequence: Synthetic peptide"
WTSTRES

SEQ ID NO: 907 - protein, 7 aa, Artificial Sequence
  source: /note="Description of Artificial Sequence: Synthetic peptide"
WTSTRDS

SEQ ID NO: 908 - protein, 7 aa, Artificial Sequence
  source: /note="Description of Artificial Sequence: Synthetic peptide"
WTSTRES

SEQ ID NO: 909 - protein, 7 aa, Artificial Sequence
  source: /note="Description of Artificial Sequence: Synthetic peptide"
TNNQRPS

SEQ ID NO: 910 - protein, 7 aa, Artificial Sequence
  source: /note="Description of Artificial Sequence: Synthetic peptide"
TNNQRPS

SEQ ID NO: 911 - protein, 7 aa, Artificial Sequence
  source: /note="Description of Artificial Sequence: Synthetic peptide"
TNNQRPS

SEQ ID NO: 912 - protein, 7 aa, Artificial Sequence
  source: /note="Description of Artificial Sequence: Synthetic peptide"
TNNQRPS

SEQ ID NO: 913 - protein, 7 aa, Artificial Sequence
  source: /note="Description of Artificial Sequence: Synthetic peptide"
TNNQRPS

SEQ ID NO: 914 - protein, 7 aa, Artificial Sequence
  source: /note="Description of Artificial Sequence: Synthetic peptide"
TNNQRPS

SEQ ID NO: 915 - protein, 7 aa, Artificial Sequence
  source: /note="Description of Artificial Sequence: Synthetic peptide"
TNNQRPS

SEQ ID NO: 916 - protein, 7 aa, Artificial Sequence
  source: /note="Description of Artificial Sequence: Synthetic peptide"
TNNQRPS

SEQ ID NO: 917 - protein, 7 aa, Artificial Sequence
  source: /note="Description of Artificial Sequence: Synthetic peptide"
TNNQRPS

SEQ ID NO: 918 - protein, 7 aa, Artificial Sequence
  source: /note="Description of Artificial Sequence: Synthetic peptide"
TNNQRPS

SEQ ID NO: 919 - protein, 7 aa, Artificial Sequence
  source: /note="Description of Artificial Sequence: Synthetic peptide"
TNNQRPS

SEQ ID NO: 920 - protein, 7 aa, Artificial Sequence
  source: /note="Description of Artificial Sequence: Synthetic peptide"
TNNQRPS

SEQ ID NO: 921 - protein, 7 aa, Artificial Sequence
  source: /note="Description of Artificial Sequence: Synthetic peptide"
TNNQRPS

SEQ ID NO: 922 - protein, 7 aa, Artificial Sequence
  source: /note="Description of Artificial Sequence: Synthetic peptide"
TNNQRPS

SEQ ID NO: 923 - protein, 7 aa, Artificial Sequence
  source: /note="Description of Artificial Sequence: Synthetic peptide"
GASSLQS

SEQ ID NO: 924 - protein, 7 aa, Artificial Sequence
  source: /note="Description of Artificial Sequence: Synthetic peptide"
GASSLQS

SEQ ID NO: 925 - protein, 7 aa, Artificial Sequence
  source: /note="Description of Artificial Sequence: Synthetic peptide"
TNNQRPS

SEQ ID NO: 926 - protein, 7 aa, Artificial Sequence
  source: /note="Description of Artificial Sequence: Synthetic peptide"
VASSLQS

SEQ ID NO: 927 - protein, 7 aa, Artificial Sequence
  source: /note="Description of Artificial Sequence: Synthetic peptide"
DNNKRPS

SEQ ID NO: 928 - protein, 7 aa, Artificial Sequence
  source: /note="Description of Artificial Sequence: Synthetic peptide"
VASSLQS

SEQ ID NO: 929 - protein, 7 aa, Artificial Sequence
  source: /note="Description of Artificial Sequence: Synthetic peptide"
VASSLQS

SEQ ID NO: 930 - protein, 7 aa, Artificial Sequence
  source: /note="Description of Artificial Sequence: Synthetic peptide"
VASSLQS

SEQ ID NO: 931 - protein, 7 aa, Artificial Sequence
  source: /note="Description of Artificial Sequence: Synthetic peptide"
VASSLQS

SEQ ID NO: 932 - protein, 7 aa, Artificial Sequence
  source: /note="Description of Artificial Sequence: Synthetic peptide"
VASSLQS

SEQ ID NO: 933 - protein, 7 aa, Artificial Sequence
  source: /note="Description of Artificial Sequence: Synthetic peptide"
VASSLQS

SEQ ID NO: 934 - protein, 7 aa, Artificial Sequence
  source: /note="Description of Artificial Sequence: Synthetic peptide"
DNNKRPS

SEQ ID NO: 935 - protein, 7 aa, Artificial Sequence
  source: /note="Description of Artificial Sequence: Synthetic peptide"
DNNKRPS

SEQ ID NO: 936 - protein, 7 aa, Artificial Sequence
  source: /note="Description of Artificial Sequence: Synthetic peptide"
DNNKRPS

SEQ ID NO: 937 - protein, 7 aa, Artificial Sequence
  source: /note="Description of Artificial Sequence: Synthetic peptide"
DNNKRPS

SEQ ID NO: 938 - protein, 7 aa, Artificial Sequence
  source: /note="Description of Artificial Sequence: Synthetic peptide"
DNNKRPS

SEQ ID NO: 939 - protein, 7 aa, Artificial Sequence
  source: /note="Description of Artificial Sequence: Synthetic peptide"
DNNKRPS

SEQ ID NO: 940 - protein, 7 aa, Artificial Sequence
  source: /note="Description of Artificial Sequence: Synthetic peptide"
DNNKRPS

SEQ ID NO: 941 - protein, 7 aa, Artificial Sequence
  source: /note="Description of Artificial Sequence: Synthetic peptide"
DNNKRPS

SEQ ID NO: 942 - protein, 7 aa, Artificial Sequence
  source: /note="Description of Artificial Sequence: Synthetic peptide"
VASSLQS

SEQ ID NO: 943 - protein, 11 aa, Artificial Sequence
  source: /note="Description of Artificial Sequence: Synthetic peptide"
ATFDDSLNGPV

SEQ ID NO: 944 - protein, 9 aa, Artificial Sequence
  source: /note="Description of Artificial Sequence: Synthetic peptide"
LQHNNYPFT

SEQ ID NO: 945 - protein, 9 aa, Artificial Sequence
  source: /note="Description of Artificial Sequence: Synthetic peptide"
LQHNNYPFT

SEQ ID NO: 946 - protein, 8 aa, Artificial Sequence
  source: /note="Description of Artificial Sequence: Synthetic peptide"
QQYDILLT

SEQ ID NO: 947 - protein, 9 aa, Artificial Sequence
  source: /note="Description of Artificial Sequence: Synthetic peptide"
QQYYSTPWT

SEQ ID NO: 948 - protein, 9 aa, Artificial Sequence
  source: /note="Description of Artificial Sequence: Synthetic peptide"
QQYYSTPWT

SEQ ID NO: 949 - protein, 9 aa, Artificial Sequence
  source: /note="Description of Artificial Sequence: Synthetic peptide"
QQYYRTPWT

SEQ ID NO: 950 - protein, 9 aa, Artificial Sequence
  source: /note="Description of Artificial Sequence: Synthetic peptide"
QQYYRTPWT

SEQ ID NO: 951 - protein, 9 aa, Artificial Sequence
  source: /note="Description of Artificial Sequence: Synthetic peptide"
QQYGSSPLT

SEQ ID NO: 952 - protein, 9 aa, Artificial Sequence
  source: /note="Description of Artificial Sequence: Synthetic peptide"
QQYNNWPLT

SEQ ID NO: 953 - protein, 9 aa, Artificial Sequence
  source: /note="Description of Artificial Sequence: Synthetic peptide"
LQHNSYPFT

SEQ ID NO: 954 - protein, 8 aa, Artificial Sequence
  source: /note="Description of Artificial Sequence: Synthetic peptide"
QQYDDLFT

SEQ ID NO: 955 - protein, 9 aa, Artificial Sequence
  source: /note="Description of Artificial Sequence: Synthetic peptide"
QQTNSFPPT

SEQ ID NO: 956 - protein, 9 aa, Artificial Sequence
  source: /note="Description of Artificial Sequence: Synthetic peptide"
QQTNSFPPT

SEQ ID NO: 957 - protein, 9 aa, Artificial Sequence
  source: /note="Description of Artificial Sequence: Synthetic peptide"
LQHNSYPFT

SEQ ID NO: 958 - protein, 9 aa, Artificial Sequence
  source: /note="Description of Artificial Sequence: Synthetic peptide"
LQHNSYPFT

SEQ ID NO: 959 - protein, 9 aa, Artificial Sequence
  source: /note="Description of Artificial Sequence: Synthetic peptide"
LQHNSYPFT

SEQ ID NO: 960 - protein, 9 aa, Artificial Sequence
  source: /note="Description of Artificial Sequence: Synthetic peptide"
LQHNSYPFT

SEQ ID NO: 961 - protein, 9 aa, Artificial Sequence
  source: /note="Description of Artificial Sequence: Synthetic peptide"
LQHNSYPFT

SEQ ID NO: 962 - protein, 9 aa, Artificial Sequence
  source: /note="Description of Artificial Sequence: Synthetic peptide"
LQHNSYPFT

SEQ ID NO: 963 - protein, 9 aa, Artificial Sequence
  source: /note="Description of Artificial Sequence: Synthetic peptide"
LQHNNYPFT

SEQ ID NO: 964 - protein, 9 aa, Artificial Sequence
  source: /note="Description of Artificial Sequence: Synthetic peptide"
LQHNNYPFT

SEQ ID NO: 965 - protein, 9 aa, Artificial Sequence
  source: /note="Description of Artificial Sequence: Synthetic peptide"
LQHNNYPFT

SEQ ID NO: 966 - protein, 9 aa, Artificial Sequence
  source: /note="Description of Artificial Sequence: Synthetic peptide"
LQHNNYPFT

SEQ ID NO: 967 - protein, 9 aa, Artificial Sequence
  source: /note="Description of Artificial Sequence: Synthetic peptide"
LQHNNYPFT

SEQ ID NO: 968 - protein, 9 aa, Artificial Sequence
  source: /note="Description of Artificial Sequence: Synthetic peptide"
LQHNNYPFT

SEQ ID NO: 969 - protein, 9 aa, Artificial Sequence
  source: /note="Description of Artificial Sequence: Synthetic peptide"
LQHNNYPFT

SEQ ID NO: 970 - protein, 9 aa, Artificial Sequence
  source: /note="Description of Artificial Sequence: Synthetic peptide"
LQHNNYPFT

SEQ ID NO: 971 - protein, 9 aa, Artificial Sequence
  source: /note="Description of Artificial Sequence: Synthetic peptide"
LQHNNYPFT

SEQ ID NO: 972 - protein, 9 aa, Artificial Sequence
  source: /note="Description of Artificial Sequence: Synthetic peptide"
LQHNNYPFT

SEQ ID NO: 973 - protein, 9 aa, Artificial Sequence
  source: /note="Description of Artificial Sequence: Synthetic peptide"
LQHNNYPFT

SEQ ID NO: 974 - protein, 9 aa, Artificial Sequence
  source: /note="Description of Artificial Sequence: Synthetic peptide"
LQHNNYPFT

SEQ ID NO: 975 - protein, 9 aa, Artificial Sequence
  source: /note="Description of Artificial Sequence: Synthetic peptide"
LQHNNYPFT

SEQ ID NO: 976 - protein, 9 aa, Artificial Sequence
  source: /note="Description of Artificial Sequence: Synthetic peptide"
LQHNNYPFT

SEQ ID NO: 977 - protein, 9 aa, Artificial Sequence
  source: /note="Description of Artificial Sequence: Synthetic peptide"
LQHNNYPFT

SEQ ID NO: 978 - protein, 9 aa, Artificial Sequence
  source: /note="Description of Artificial Sequence: Synthetic peptide"
LQHNNYPFT

SEQ ID NO: 979 - protein, 9 aa, Artificial Sequence
  source: /note="Description of Artificial Sequence: Synthetic peptide"
LQHNNYPFT

SEQ ID NO: 980 - protein, 9 aa, Artificial Sequence
  source: /note="Description of Artificial Sequence: Synthetic peptide"
LQHNNYPFT

SEQ ID NO: 981 - protein, 9 aa, Artificial Sequence
  source: /note="Description of Artificial Sequence: Synthetic peptide"
LQHNNYPFT

SEQ ID NO: 982 - protein, 8 aa, Artificial Sequence
  source: /note="Description of Artificial Sequence: Synthetic peptide"
QQYDILLT

SEQ ID NO: 983 - protein, 8 aa, Artificial Sequence
  source: /note="Description of Artificial Sequence: Synthetic peptide"
QQYDILLT

SEQ ID NO: 984 - protein, 8 aa, Artificial Sequence
  source: /note="Description of Artificial Sequence: Synthetic peptide"
QQYDILLT

SEQ ID NO: 985 - protein, 8 aa, Artificial Sequence
  source: /note="Description of Artificial Sequence: Synthetic peptide"
QQYDILLT

SEQ ID NO: 986 - protein, 8 aa, Artificial Sequence
  source: /note="Description of Artificial Sequence: Synthetic peptide"
QQYDILLT

SEQ ID NO: 987 - protein, 8 aa, Artificial Sequence
  source: /note="Description of Artificial Sequence: Synthetic peptide"
QQYDILLT

SEQ ID NO: 988 - protein, 8 aa, Artificial Sequence
  source: /note="Description of Artificial Sequence: Synthetic peptide"
QQYDILLT

SEQ ID NO: 989 - protein, 8 aa, Artificial Sequence
  source: /note="Description of Artificial Sequence: Synthetic peptide"
QQYDILLT

SEQ ID NO: 990 - protein, 8 aa, Artificial Sequence
  source: /note="Description of Artificial Sequence: Synthetic peptide"
QQYDILLT

SEQ ID NO: 991 - protein, 9 aa, Artificial Sequence
  source: /note="Description of Artificial Sequence: Synthetic peptide"
LQHNNYPFT

SEQ ID NO: 992 - protein, 9 aa, Artificial Sequence
  source: /note="Description of Artificial Sequence: Synthetic peptide"
LQHNNYPFT

SEQ ID NO: 993 - protein, 9 aa, Artificial Sequence
  source: /note="Description of Artificial Sequence: Synthetic peptide"
LQHNNYPFT

SEQ ID NO: 994 - protein, 9 aa, Artificial Sequence
  source: /note="Description of Artificial Sequence: Synthetic peptide"
LQHNNYPFT

SEQ ID NO: 995 - protein, 9 aa, Artificial Sequence
  source: /note="Description of Artificial Sequence: Synthetic peptide"
LQHNNYPFT

SEQ ID NO: 996 - protein, 9 aa, Artificial Sequence
  source: /note="Description of Artificial Sequence: Synthetic peptide"
LQHNNYPFT

SEQ ID NO: 997 - protein, 9 aa, Artificial Sequence
  source: /note="Description of Artificial Sequence: Synthetic peptide"
LQHNNYPFT

SEQ ID NO: 998 - protein, 8 aa, Artificial Sequence
  source: /note="Description of Artificial Sequence: Synthetic peptide"
QQYDDLFT

SEQ ID NO: 999 - protein, 8 aa, Artificial Sequence
  source: /note="Description of Artificial Sequence: Synthetic peptide"
QQYDDLFT

SEQ ID NO: 1000 - protein, 8 aa, Artificial Sequence
  source: /note="Description of Artificial Sequence: Synthetic peptide"
QQYDDLFT

SEQ ID NO: 1001 - protein, 8 aa, Artificial Sequence
  source: /note="Description of Artificial Sequence: Synthetic peptide"
QQYDDLFT

SEQ ID NO: 1002 - protein, 8 aa, Artificial Sequence
  source: /note="Description of Artificial Sequence: Synthetic peptide"
QQYDDLFT

SEQ ID NO: 1003 - protein, 8 aa, Artificial Sequence
  source: /note="Description of Artificial Sequence: Synthetic peptide"
QQYDDLFT

SEQ ID NO: 1004 - protein, 8 aa, Artificial Sequence
  source: /note="Description of Artificial Sequence: Synthetic peptide"
QQYDDLFT

SEQ ID NO: 1005 - protein, 8 aa, Artificial Sequence
  source: /note="Description of Artificial Sequence: Synthetic peptide"
QQYDDLFT

SEQ ID NO: 1006 - protein, 8 aa, Artificial Sequence
  source: /note="Description of Artificial Sequence: Synthetic peptide"
QQYDDLFT

SEQ ID NO: 1007 - protein, 8 aa, Artificial Sequence
  source: /note="Description of Artificial Sequence: Synthetic peptide"
QQYDDLFT

SEQ ID NO: 1008 - protein, 8 aa, Artificial Sequence
  source: /note="Description of Artificial Sequence: Synthetic peptide"
QQYDDLFT

SEQ ID NO: 1009 - protein, 8 aa, Artificial Sequence
  source: /note="Description of Artificial Sequence: Synthetic peptide"
QQYGSSPR

SEQ ID NO: 1010 - protein, 8 aa, Artificial Sequence
  source: /note="Description of Artificial Sequence: Synthetic peptide"
QQYGSSPR

SEQ ID NO: 1011 - protein, 8 aa, Artificial Sequence
  source: /note="Description of Artificial Sequence: Synthetic peptide"
QQYGSSPR

SEQ ID NO: 1012 - protein, 8 aa, Artificial Sequence
  source: /note="Description of Artificial Sequence: Synthetic peptide"
QQYGSSPR

SEQ ID NO: 1013 - protein, 9 aa, Artificial Sequence
  source: /note="Description of Artificial Sequence: Synthetic peptide"
QQYNNWPLT

SEQ ID NO: 1014 - protein, 9 aa, Artificial Sequence
  source: /note="Description of Artificial Sequence: Synthetic peptide"
QQYNNWPLT

SEQ ID NO: 1015 - protein, 9 aa, Artificial Sequence
  source: /note="Description of Artificial Sequence: Synthetic peptide"
QQYNNWPLT

SEQ ID NO: 1016 - protein, 9 aa, Artificial Sequence
  source: /note="Description of Artificial Sequence: Synthetic peptide"
QQYNNWPLT

SEQ ID NO: 1017 - protein, 9 aa, Artificial Sequence
  source: /note="Description of Artificial Sequence: Synthetic peptide"
QQYNNFPLT

SEQ ID NO: 1018 - protein, 9 aa, Artificial Sequence
  source: /note="Description of Artificial Sequence: Synthetic peptide"
QQYNNYPLT

SEQ ID NO: 1019 - protein, 9 aa, Artificial Sequence
  source: /note="Description of Artificial Sequence: Synthetic peptide"
QQYNNWPLT

SEQ ID NO: 1020 - protein, 9 aa, Artificial Sequence
  source: /note="Description of Artificial Sequence: Synthetic peptide"
QQYNNWPLT

SEQ ID NO: 1021 - protein, 9 aa, Artificial Sequence
  source: /note="Description of Artificial Sequence: Synthetic peptide"
QQYGSSPLT

SEQ ID NO: 1022 - protein, 9 aa, Artificial Sequence
  source: /note="Description of Artificial Sequence: Synthetic peptide"
QQYGSSPLT

SEQ ID NO: 1023 - protein, 9 aa, Artificial Sequence
  source: /note="Description of Artificial Sequence: Synthetic peptide"
QQYGSSPLT

SEQ ID NO: 1024 - protein, 9 aa, Artificial Sequence
  source: /note="Description of Artificial Sequence: Synthetic peptide"
QQYGSSPLT

SEQ ID NO: 1025 - protein, 9 aa, Artificial Sequence
  source: /note="Description of Artificial Sequence: Synthetic peptide"
QQYGSSPLT

SEQ ID NO: 1026 - protein, 9 aa, Artificial Sequence
  source: /note="Description of Artificial Sequence: Synthetic peptide"
QQYGSSPLT

SEQ ID NO: 1027 - protein, 9 aa, Artificial Sequence
  source: /note="Description of Artificial Sequence: Synthetic peptide"
QQYGSSPLT

SEQ ID NO: 1028 - protein, 9 aa, Artificial Sequence
  source: /note="Description of Artificial Sequence: Synthetic peptide"
QQYYSTPWT

SEQ ID NO: 1029 - protein, 9 aa, Artificial Sequence
  source: /note="Description of Artificial Sequence: Synthetic peptide"
QQYYSTPWT

SEQ ID NO: 1030 - protein, 9 aa, Artificial Sequence
  source: /note="Description of Artificial Sequence: Synthetic peptide"
QQYYSTPWT

SEQ ID NO: 1031 - protein, 9 aa, Artificial Sequence
  source: /note="Description of Artificial Sequence: Synthetic peptide"
QQYYSTPWT

SEQ ID NO: 1032 - protein, 9 aa, Artificial Sequence
  source: /note="Description of Artificial Sequence: Synthetic peptide"
QQYYSTPWT

SEQ ID NO: 1033 - protein, 9 aa, Artificial Sequence
  source: /note="Description of Artificial Sequence: Synthetic peptide"
QQYYSTPWT

SEQ ID NO: 1034 - protein, 9 aa, Artificial Sequence
  source: /note="Description of Artificial Sequence: Synthetic peptide"
QQYYSTPWT

SEQ ID NO: 1035 - protein, 9 aa, Artificial Sequence
  source: /note="Description of Artificial Sequence: Synthetic peptide"
QQYYSTPWT

SEQ ID NO: 1036 - protein, 9 aa, Artificial Sequence
  source: /note="Description of Artificial Sequence: Synthetic peptide"
QQYYSTPWT

SEQ ID NO: 1037 - protein, 9 aa, Artificial Sequence
  source: /note="Description of Artificial Sequence: Synthetic peptide"
QQYYSTPWT

SEQ ID NO: 1038 - protein, 9 aa, Artificial Sequence
  source: /note="Description of Artificial Sequence: Synthetic peptide"
QQYYSTPWT

SEQ ID NO: 1039 - protein, 9 aa, Artificial Sequence
  source: /note="Description of Artificial Sequence: Synthetic peptide"
QQYYRTPWT

SEQ ID NO: 1040 - protein, 9 aa, Artificial Sequence
  source: /note="Description of Artificial Sequence: Synthetic peptide"
QQYYRTPWT

SEQ ID NO: 1041 - protein, 9 aa, Artificial Sequence
  source: /note="Description of Artificial Sequence: Synthetic peptide"
QQYYRTPWT

SEQ ID NO: 1042 - protein, 9 aa, Artificial Sequence
  source: /note="Description of Artificial Sequence: Synthetic peptide"
QQYYRTPWT

SEQ ID NO: 1043 - protein, 9 aa, Artificial Sequence
  source: /note="Description of Artificial Sequence: Synthetic peptide"
QQYYRTPWT

SEQ ID NO: 1044 - protein, 9 aa, Artificial Sequence
  source: /note="Description of Artificial Sequence: Synthetic peptide"
QQYYRTPWT

SEQ ID NO: 1045 - protein, 9 aa, Artificial Sequence
  source: /note="Description of Artificial Sequence: Synthetic peptide"
QQYYRTPWT

SEQ ID NO: 1046 - protein, 9 aa, Artificial Sequence
  source: /note="Description of Artificial Sequence: Synthetic peptide"
QQYYRTPWT

SEQ ID NO: 1047 - protein, 9 aa, Artificial Sequence
  source: /note="Description of Artificial Sequence: Synthetic peptide"
QQYYRTPWT

SEQ ID NO: 1048 - protein, 9 aa, Artificial Sequence
  source: /note="Description of Artificial Sequence: Synthetic peptide"
QQYYSTPWT

SEQ ID NO: 1049 - protein, 9 aa, Artificial Sequence
  source: /note="Description of Artificial Sequence: Synthetic peptide"
QQYYSTPWT

SEQ ID NO: 1050 - protein, 9 aa, Artificial Sequence
  source: /note="Description of Artificial Sequence: Synthetic peptide"
QQYYSTPWT

SEQ ID NO: 1051 - protein, 9 aa, Artificial Sequence
  source: /note="Description of Artificial Sequence: Synthetic peptide"
QQYYSTPWT

SEQ ID NO: 1052 - protein, 9 aa, Artificial Sequence
  source: /note="Description of Artificial Sequence: Synthetic peptide"
QQYYSTPWT

SEQ ID NO: 1053 - protein, 9 aa, Artificial Sequence
  source: /note="Description of Artificial Sequence: Synthetic peptide"
QQYYRTPWT

SEQ ID NO: 1054 - protein, 9 aa, Artificial Sequence
  source: /note="Description of Artificial Sequence: Synthetic peptide"
QQYYRTPWT

SEQ ID NO: 1055 - protein, 9 aa, Artificial Sequence
  source: /note="Description of Artificial Sequence: Synthetic peptide"
QQYYRTPWT

SEQ ID NO: 1056 - protein, 9 aa, Artificial Sequence
  source: /note="Description of Artificial Sequence: Synthetic peptide"
QQYYRTPWT

SEQ ID NO: 1057 - protein, 9 aa, Artificial Sequence
  source: /note="Description of Artificial Sequence: Synthetic peptide"
QQYYRTPWT

SEQ ID NO: 1058 - protein, 9 aa, Artificial Sequence
  source: /note="Description of Artificial Sequence: Synthetic peptide"
QQYYRTPWT

SEQ ID NO: 1059 - protein, 9 aa, Artificial Sequence
  source: /note="Description of Artificial Sequence: Synthetic peptide"
QQYYRTPWT

SEQ ID NO: 1060 - protein, 9 aa, Artificial Sequence
  source: /note="Description of Artificial Sequence: Synthetic peptide"
QQYYRTPWT

SEQ ID NO: 1061 - protein, 9 aa, Artificial Sequence
  source: /note="Description of Artificial Sequence: Synthetic peptide"
QQYYRTPWT

SEQ ID NO: 1062 - protein, 9 aa, Artificial Sequence
  source: /note="Description of Artificial Sequence: Synthetic peptide"
QQYYRTPWT

SEQ ID NO: 1063 - protein, 9 aa, Artificial Sequence
  source: /note="Description of Artificial Sequence: Synthetic peptide"
QQYYRTPWT

SEQ ID NO: 1064 - protein, 9 aa, Artificial Sequence
  source: /note="Description of Artificial Sequence: Synthetic peptide"
QQYYRTPWT

SEQ ID NO: 1065 - protein, 9 aa, Artificial Sequence
  source: /note="Description of Artificial Sequence: Synthetic peptide"
QQYYRTPWT

SEQ ID NO: 1066 - protein, 11 aa, Artificial Sequence
  source: /note="Description of Artificial Sequence: Synthetic peptide"
ATFDESLSGPV

SEQ ID NO: 1067 - protein, 11 aa, Artificial Sequence
  source: /note="Description of Artificial Sequence: Synthetic peptide"
ATFDESLQGPV

SEQ ID NO: 1068 - protein, 11 aa, Artificial Sequence
  source: /note="Description of Artificial Sequence: Synthetic peptide"
ATFDESLSGPV

SEQ ID NO: 1069 - protein, 11 aa, Artificial Sequence
  source: /note="Description of Artificial Sequence: Synthetic peptide"
ATFDESLQGPV

SEQ ID NO: 1070 - protein, 11 aa, Artificial Sequence
  source: /note="Description of Artificial Sequence: Synthetic peptide"
ATFDDSLNGPV

SEQ ID NO: 1071 - protein, 11 aa, Artificial Sequence
  source: /note="Description of Artificial Sequence: Synthetic peptide"
ATFDDSLNGPV

SEQ ID NO: 1072 - protein, 11 aa, Artificial Sequence
  source: /note="Description of Artificial Sequence: Synthetic peptide"
ATFDESLNGPV

SEQ ID NO: 1073 - protein, 11 aa, Artificial Sequence
  source: /note="Description of Artificial Sequence: Synthetic peptide"
ATFDDSLQGPV

SEQ ID NO: 1074 - protein, 11 aa, Artificial Sequence
  source: /note="Description of Artificial Sequence: Synthetic peptide"
ATFDDSLSGPV

SEQ ID NO: 1075 - protein, 11 aa, Artificial Sequence
  source: /note="Description of Artificial Sequence: Synthetic peptide"
ATFDDSLNAPV

SEQ ID NO: 1076 - protein, 11 aa, Artificial Sequence
  source: /note="Description of Artificial Sequence: Synthetic peptide"
ATFDSSLNGPV

SEQ ID NO: 1077 - protein, 11 aa, Artificial Sequence
  source: /note="Description of Artificial Sequence: Synthetic peptide"
ATFDSSLNAPV

SEQ ID NO: 1078 - protein, 11 aa, Artificial Sequence
  source: /note="Description of Artificial Sequence: Synthetic peptide"
ATFDSSLNAPV

SEQ ID NO: 1079 - protein, 11 aa, Artificial Sequence
  source: /note="Description of Artificial Sequence: Synthetic peptide"
ATFDESLSGPV

SEQ ID NO: 1080 - protein, 9 aa, Artificial Sequence
  source: /note="Description of Artificial Sequence: Synthetic peptide"
LQHNNYPFT

SEQ ID NO: 1081 - protein, 9 aa, Artificial Sequence
  source: /note="Description of Artificial Sequence: Synthetic peptide"
LQHNNYPFT

SEQ ID NO: 1082 - protein, 11 aa, Artificial Sequence
  source: /note="Description of Artificial Sequence: Synthetic peptide"
ATFDSSLSGPV

SEQ ID NO: 1083 - protein, 9 aa, Artificial Sequence
  source: /note="Description of Artificial Sequence: Synthetic peptide"
QQSYSTLIS

SEQ ID NO: 1084 - protein, 11 aa, Artificial Sequence
  source: /note="Description of Artificial Sequence: Synthetic peptide"
GTWDSSLSAVV

SEQ ID NO: 1085 - protein, 9 aa, Artificial Sequence
  source: /note="Description of Artificial Sequence: Synthetic peptide"
QQSYSTLIS

SEQ ID NO: 1086 - protein, 9 aa, Artificial Sequence
  source: /note="Description of Artificial Sequence: Synthetic peptide"
QQSYSTLIS

SEQ ID NO: 1087 - protein, 9 aa, Artificial Sequence
  source: /note="Description of Artificial Sequence: Synthetic peptide"
QQSYSTLIS

SEQ ID NO: 1088 - protein, 9 aa, Artificial Sequence
  source: /note="Description of Artificial Sequence: Synthetic peptide"
QQSYSTLIS

SEQ ID NO: 1089 - protein, 9 aa, Artificial Sequence
  source: /note="Description of Artificial Sequence: Synthetic peptide"
QQSYSTLIS

SEQ ID NO: 1090 - protein, 9 aa, Artificial Sequence
  source: /note="Description of Artificial Sequence: Synthetic peptide"
QQSYSTLIS

SEQ ID NO: 1091 - protein, 11 aa, Artificial Sequence
  source: /note="Description of Artificial Sequence: Synthetic peptide"
GTWDSSLSAVV

SEQ ID NO: 1092 - protein, 11 aa, Artificial Sequence
  source: /note="Description of Artificial Sequence: Synthetic peptide"
GTWDSSLSAVV

SEQ ID NO: 1093 - protein, 11 aa, Artificial Sequence
  source: /note="Description of Artificial Sequence: Synthetic peptide"
GTWDSSLSAVV

SEQ ID NO: 1094 - protein, 11 aa, Artificial Sequence
  source: /note="Description of Artificial Sequence: Synthetic peptide"
GTFESSLSAVV

SEQ ID NO: 1095 - protein, 11 aa, Artificial Sequence
  source: /note="Description of Artificial Sequence: Synthetic peptide"
GTWDSSLSAVV

SEQ ID NO: 1096 - protein, 11 aa, Artificial Sequence
  source: /note="Description of Artificial Sequence: Synthetic peptide"
GTWDSSLSAVV

SEQ ID NO: 1097 - protein, 11 aa, Artificial Sequence
  source: /note="Description of Artificial Sequence: Synthetic peptide"
GTWDSSLSAVV

SEQ ID NO: 1098 - protein, 11 aa, Artificial Sequence
  source: /note="Description of Artificial Sequence: Synthetic peptide"
GTFESSLSAVV

SEQ ID NO: 1099 - protein, 9 aa, Artificial Sequence
  source: /note="Description of Artificial Sequence: Synthetic peptide"
QQSYSTLLS

SEQ ID NO: 1100 - protein, 5 aa, Artificial Sequence
  source: /note="Description of Artificial Sequence: Synthetic peptide"
GYYMH

SEQ ID NO: 1101 - protein, 5 aa, Artificial Sequence
  source: /note="Description of Artificial Sequence: Synthetic peptide"
NFGMH

SEQ ID NO: 1102 - protein, 5 aa, Artificial Sequence
  source: /note="Description of Artificial Sequence: Synthetic peptide"
YFGMH

SEQ ID NO: 1103 - protein, 5 aa, Artificial Sequence
  source: /note="Description of Artificial Sequence: Synthetic peptide"
SYGMH

SEQ ID NO: 1104 - protein, 5 aa, Artificial Sequence
  source: /note="Description of Artificial Sequence: Synthetic peptide"
GYYIH

SEQ ID NO: 1105 - protein, 5 aa, Artificial Sequence
  source: /note="Description of Artificial Sequence: Synthetic peptide"
GYYIH

SEQ ID NO: 1106 - protein, 5 aa, Artificial Sequence
  source: /note="Description of Artificial Sequence: Synthetic peptide"
GYYIH

SEQ ID NO: 1107 - protein, 5 aa, Artificial Sequence
  source: /note="Description of Artificial Sequence: Synthetic peptide"
GYYIH

SEQ ID NO: 1108 - protein, 7 aa, Artificial Sequence
  source: /note="Description of Artificial Sequence: Synthetic peptide"
SGGYYWS

SEQ ID NO: 1109 - protein, 5 aa, Artificial Sequence
  source: /note="Description of Artificial Sequence: Synthetic peptide"
NYGMH

SEQ ID NO: 1110 - protein, 5 aa, Artificial Sequence
  source: /note="Description of Artificial Sequence: Synthetic peptide"
YFGMH

SEQ ID NO: 1111 - protein, 5 aa, Artificial Sequence
  source: /note="Description of Artificial Sequence: Synthetic peptide"
SYGMH

SEQ ID NO: 1112 - protein, 5 aa, Artificial Sequence
  source: /note="Description of Artificial Sequence: Synthetic peptide"
SYYWS

SEQ ID NO: 1113 - protein, 5 aa, Artificial Sequence
  source: /note="Description of Artificial Sequence: Synthetic peptide"
SYYWS

SEQ ID NO: 1114 - protein, 5 aa, Artificial Sequence
  source: /note="Description of Artificial Sequence: Synthetic peptide"
YFGMH

SEQ ID NO: 1115 - protein, 5 aa, Artificial Sequence
  source: /note="Description of Artificial Sequence: Synthetic peptide"
YFGMH

SEQ ID NO: 1116 - protein, 5 aa, Artificial Sequence
  source: /note="Description of Artificial Sequence: Synthetic peptide"
YFGMH

SEQ ID NO: 1117 - protein, 5 aa, Artificial Sequence
  source: /note="Description of Artificial Sequence: Synthetic peptide"
YFGMH

SEQ ID NO: 1118 - protein, 5 aa, Artificial Sequence
  source: /note="Description of Artificial Sequence: Synthetic peptide"
YFGMH

SEQ ID NO: 1119 - protein, 5 aa, Artificial Sequence
  source: /note="Description of Artificial Sequence: Synthetic peptide"
YFGMH

SEQ ID NO: 1120 - protein, 5 aa, Artificial Sequence
  source: /note="Description of Artificial Sequence: Synthetic peptide"
NFGMH

SEQ ID NO: 1121 - protein, 5 aa, Artificial Sequence
  source: /note="Description of Artificial Sequence: Synthetic peptide"
NFGMH

SEQ ID NO: 1122 - protein, 5 aa, Artificial Sequence
  source: /note="Description of Artificial Sequence: Synthetic peptide"
NFGMH

SEQ ID NO: 1123 - protein, 5 aa, Artificial Sequence
  source: /note="Description of Artificial Sequence: Synthetic peptide"
NFGMH

SEQ ID NO: 1124 - protein, 5 aa, Artificial Sequence
  source: /note="Description of Artificial Sequence: Synthetic peptide"
NFGMH

SEQ ID NO: 1125 - protein, 5 aa, Artificial Sequence
  source: /note="Description of Artificial Sequence: Synthetic peptide"
NFGMH

SEQ ID NO: 1126 - protein, 5 aa, Artificial Sequence
  source: /note="Description of Artificial Sequence: Synthetic peptide"
NFGMH

SEQ ID NO: 1127 - protein, 5 aa, Artificial Sequence
  source: /note="Description of Artificial Sequence: Synthetic peptide"
NFGMH

SEQ ID NO: 1128 - protein, 5 aa, Artificial Sequence
  source: /note="Description of Artificial Sequence: Synthetic peptide"
NFGMH

SEQ ID NO: 1129 - protein, 5 aa, Artificial Sequence
  source: /note="Description of Artificial Sequence: Synthetic peptide"
NFGMH

SEQ ID NO: 1130 - protein, 5 aa, Artificial Sequence
  source: /note="Description of Artificial Sequence: Synthetic peptide"
NFGMH

SEQ ID NO: 1131 - protein, 5 aa, Artificial Sequence
  source: /note="Description of Artificial Sequence: Synthetic peptide"
NFGMH

SEQ ID NO: 1132 - protein, 5 aa, Artificial Sequence
  source: /note="Description of Artificial Sequence: Synthetic peptide"
NFGMH

SEQ ID NO: 1133 - protein, 5 aa, Artificial Sequence
  source: /note="Description of Artificial Sequence: Synthetic peptide"
NFGMH

SEQ ID NO: 1134 - protein, 5 aa, Artificial Sequence
  source: /note="Description of Artificial Sequence: Synthetic peptide"
NFGMH

SEQ ID NO: 1135 - protein, 5 aa, Artificial Sequence
  source: /note="Description of Artificial Sequence: Synthetic peptide"
NFGMH

SEQ ID NO: 1136 - protein, 5 aa, Artificial Sequence
  source: /note="Description of Artificial Sequence: Synthetic peptide"
NFGMH

SEQ ID NO: 1137 - protein, 5 aa, Artificial Sequence
  source: /note="Description of Artificial Sequence: Synthetic peptide"
NFGMH

SEQ ID NO: 1138 - protein, 5 aa, Artificial Sequence
  source: /note="Description of Artificial Sequence: Synthetic peptide"
NFGMH

SEQ ID NO: 1139 - protein, 5 aa, Artificial Sequence
  source: /note="Description of Artificial Sequence: Synthetic peptide"
SYGMH

SEQ ID NO: 1140 - protein, 5 aa, Artificial Sequence
  source: /note="Description of Artificial Sequence: Synthetic peptide"
SYGMH

SEQ ID NO: 1141 - protein, 5 aa, Artificial Sequence
  source: /note="Description of Artificial Sequence: Synthetic peptide"
SYGMH

SEQ ID NO: 1142 - protein, 5 aa, Artificial Sequence
  source: /note="Description of Artificial Sequence: Synthetic peptide"
SYGMH

SEQ ID NO: 1143 - protein, 5 aa, Artificial Sequence
  source: /note="Description of Artificial Sequence: Synthetic peptide"
SYGMH

SEQ ID NO: 1144 - protein, 5 aa, Artificial Sequence
  source: /note="Description of Artificial Sequence: Synthetic peptide"
SYGMH

SEQ ID NO: 1145 - protein, 5 aa, Artificial Sequence
  source: /note="Description of Artificial Sequence: Synthetic peptide"
SYGMH

SEQ ID NO: 1146 - protein, 5 aa, Artificial Sequence
  source: /note="Description of Artificial Sequence: Synthetic peptide"
SYGMH

SEQ ID NO: 1147 - protein, 5 aa, Artificial Sequence
  source: /note="Description of Artificial Sequence: Synthetic peptide"
SYGMH

SEQ ID NO: 1148 - protein, 5 aa, Artificial Sequence
  source: /note="Description of Artificial Sequence: Synthetic peptide"
YFGMH

SEQ ID NO: 1149 - protein, 5 aa, Artificial Sequence
  source: /note="Description of Artificial Sequence: Synthetic peptide"
YFGMH

SEQ ID NO: 1150 - protein, 5 aa, Artificial Sequence
  source: /note="Description of Artificial Sequence: Synthetic peptide"
YFGMH

SEQ ID NO: 1151 - protein, 5 aa, Artificial Sequence
  source: /note="Description of Artificial Sequence: Synthetic peptide"
YFGMH

SEQ ID NO: 1152 - protein, 5 aa, Artificial Sequence
  source: /note="Description of Artificial Sequence: Synthetic peptide"
YFGMH

SEQ ID NO: 1153 - protein, 5 aa, Artificial Sequence
  source: /note="Description of Artificial Sequence: Synthetic peptide"
YFGMH

SEQ ID NO: 1154 - protein, 5 aa, Artificial Sequence
  source: /note="Description of Artificial Sequence: Synthetic peptide"
YFGMH

SEQ ID NO: 1155 - protein, 5 aa, Artificial Sequence
  source: /note="Description of Artificial Sequence: Synthetic peptide"
SYGMH

SEQ ID NO: 1156 - protein, 5 aa, Artificial Sequence
  source: /note="Description of Artificial Sequence: Synthetic peptide"
SYGMH

SEQ ID NO: 1157 - protein, 5 aa, Artificial Sequence
  source: /note="Description of Artificial Sequence: Synthetic peptide"
SYGMH

SEQ ID NO: 1158 - protein, 5 aa, Artificial Sequence
  source: /note="Description of Artificial Sequence: Synthetic peptide"
SYGMH

SEQ ID NO: 1159 - protein, 5 aa, Artificial Sequence
  source: /note="Description of Artificial Sequence: Synthetic peptide"
SYGMH

SEQ ID NO: 1160 - protein, 5 aa, Artificial Sequence
  source: /note="Description of Artificial Sequence: Synthetic peptide"
SYGMH

SEQ ID NO: 1161 - protein, 5 aa, Artificial Sequence
  source: /note="Description of Artificial Sequence: Synthetic peptide"
SYGMH

SEQ ID NO: 1162 - protein, 5 aa, Artificial Sequence
  source: /note="Description of Artificial Sequence: Synthetic peptide"
SYGMH

SEQ ID NO: 1163 - protein, 5 aa, Artificial Sequence
  source: /note="Description of Artificial Sequence: Synthetic peptide"
SYGMH

SEQ ID NO: 1164 - protein, 5 aa, Artificial Sequence
  source: /note="Description of Artificial Sequence: Synthetic peptide"
SYGMH

SEQ ID NO: 1165 - protein, 5 aa, Artificial Sequence
  source: /note="Description of Artificial Sequence: Synthetic peptide"
SYGMH

SEQ ID NO: 1166 - protein, 5 aa, Artificial Sequence
  source: /note="Description of Artificial Sequence: Synthetic peptide"
SYGMH

SEQ ID NO: 1167 - protein, 5 aa, Artificial Sequence
  source: /note="Description of Artificial Sequence: Synthetic peptide"
SYGMH

SEQ ID NO: 1168 - protein, 5 aa, Artificial Sequence
  source: /note="Description of Artificial Sequence: Synthetic peptide"
SYGMH

SEQ ID NO: 1169 - protein, 5 aa, Artificial Sequence
  source: /note="Description of Artificial Sequence: Synthetic peptide"
SYGMH

SEQ ID NO: 1170 - protein, 5 aa, Artificial Sequence
  source: /note="Description of Artificial Sequence: Synthetic peptide"
NYGMH

SEQ ID NO: 1171 - protein, 5 aa, Artificial Sequence
  source: /note="Description of Artificial Sequence: Synthetic peptide"
NYGMH

SEQ ID NO: 1172 - protein, 5 aa, Artificial Sequence
  source: /note="Description of Artificial Sequence: Synthetic peptide"
NYGMH

SEQ ID NO: 1173 - protein, 5 aa, Artificial Sequence
  source: /note="Description of Artificial Sequence: Synthetic peptide"
NYGMH

SEQ ID NO: 1174 - protein, 5 aa, Artificial Sequence
  source: /note="Description of Artificial Sequence: Synthetic peptide"
NYGMH

SEQ ID NO: 1175 - protein, 5 aa, Artificial Sequence
  source: /note="Description of Artificial Sequence: Synthetic peptide"
NYGMH

SEQ ID NO: 1176 - protein, 5 aa, Artificial Sequence
  source: /note="Description of Artificial Sequence: Synthetic peptide"
NYGMH

SEQ ID NO: 1177 - protein, 5 aa, Artificial Sequence
  source: /note="Description of Artificial Sequence: Synthetic peptide"
NYGMH

SEQ ID NO: 1178 - protein, 7 aa, Artificial Sequence
  source: /note="Description of Artificial Sequence: Synthetic peptide"
SGGYYWS

SEQ ID NO: 1179 - protein, 7 aa, Artificial Sequence
  source: /note="Description of Artificial Sequence: Synthetic peptide"
SGGYYWS

SEQ ID NO: 1180 - protein, 7 aa, Artificial Sequence
  source: /note="Description of Artificial Sequence: Synthetic peptide"
SGGYYWS

SEQ ID NO: 1181 - protein, 7 aa, Artificial Sequence
  source: /note="Description of Artificial Sequence: Synthetic peptide"
SGGYYWS

SEQ ID NO: 1182 - protein, 7 aa, Artificial Sequence
  source: /note="Description of Artificial Sequence: Synthetic peptide"
SGGYYWS

SEQ ID NO: 1183 - protein, 7 aa, Artificial Sequence
  source: /note="Description of Artificial Sequence: Synthetic peptide"
SGGYYWS

SEQ ID NO: 1184 - protein, 7 aa, Artificial Sequence
  source: /note="Description of Artificial Sequence: Synthetic peptide"
SGGYYWS

SEQ ID NO: 1185 - protein, 5 aa, Artificial Sequence
  source: /note="Description of Artificial Sequence: Synthetic peptide"
GYYIH

SEQ ID NO: 1186 - protein, 5 aa, Artificial Sequence
  source: /note="Description of Artificial Sequence: Synthetic peptide"
GYYIH

SEQ ID NO: 1187 - protein, 5 aa, Artificial Sequence
  source: /note="Description of Artificial Sequence: Synthetic peptide"
GYYIH

SEQ ID NO: 1188 - protein, 5 aa, Artificial Sequence
  source: /note="Description of Artificial Sequence: Synthetic peptide"
GYYIH

SEQ ID NO: 1189 - protein, 5 aa, Artificial Sequence
  source: /note="Description of Artificial Sequence: Synthetic peptide"
GYYIH

SEQ ID NO: 1190 - protein, 5 aa, Artificial Sequence
  source: /note="Description of Artificial Sequence: Synthetic peptide"
GYYIH

SEQ ID NO: 1191 - protein, 5 aa, Artificial Sequence
  source: /note="Description of Artificial Sequence: Synthetic peptide"
GYYIH

SEQ ID NO: 1192 - protein, 5 aa, Artificial Sequence
  source: /note="Description of Artificial Sequence: Synthetic peptide"
GYYIH

SEQ ID NO: 1193 - protein, 5 aa, Artificial Sequence
  source: /note="Description of Artificial Sequence: Synthetic peptide"
GYYIH

SEQ ID NO: 1194 - protein, 5 aa, Artificial Sequence
  source: /note="Description of Artificial Sequence: Synthetic peptide"
GYYIH

SEQ ID NO: 1195 - protein, 5 aa, Artificial Sequence
  source: /note="Description of Artificial Sequence: Synthetic peptide"
GYYIH

SEQ ID NO: 1196 - protein, 5 aa, Artificial Sequence
  source: /note="Description of Artificial Sequence: Synthetic peptide"
GYYIH

SEQ ID NO: 1197 - protein, 5 aa, Artificial Sequence
  source: /note="Description of Artificial Sequence: Synthetic peptide"
GYYIH

SEQ ID NO: 1198 - protein, 5 aa, Artificial Sequence
  source: /note="Description of Artificial Sequence: Synthetic peptide"
GYYIH

SEQ ID NO: 1199 - protein, 5 aa, Artificial Sequence
  source: /note="Description of Artificial Sequence: Synthetic peptide"
GYYIH

SEQ ID NO: 1200 - protein, 5 aa, Artificial Sequence
  source: /note="Description of Artificial Sequence: Synthetic peptide"
GYYIH

SEQ ID NO: 1201 - protein, 5 aa, Artificial Sequence
  source: /note="Description of Artificial Sequence: Synthetic peptide"
GYYIH

SEQ ID NO: 1202 - protein, 5 aa, Artificial Sequence
  source: /note="Description of Artificial Sequence: Synthetic peptide"
GYYIH

SEQ ID NO: 1203 - protein, 5 aa, Artificial Sequence
  source: /note="Description of Artificial Sequence: Synthetic peptide"
GYYIH

SEQ ID NO: 1204 - protein, 5 aa, Artificial Sequence
  source: /note="Description of Artificial Sequence: Synthetic peptide"
GYYIH

SEQ ID NO: 1205 - protein, 5 aa, Artificial Sequence
  source: /note="Description of Artificial Sequence: Synthetic peptide"
GYYIH

SEQ ID NO: 1206 - protein, 5 aa, Artificial Sequence
  source: /note="Description of Artificial Sequence: Synthetic peptide"
GYYIH

SEQ ID NO: 1207 - protein, 5 aa, Artificial Sequence
  source: /note="Description of Artificial Sequence: Synthetic peptide"
GYYIH

SEQ ID NO: 1208 - protein, 5 aa, Artificial Sequence
  source: /note="Description of Artificial Sequence: Synthetic peptide"
GYYIH

SEQ ID NO: 1209 - protein, 5 aa, Artificial Sequence
  source: /note="Description of Artificial Sequence: Synthetic peptide"
GYYIH

SEQ ID NO: 1210 - protein, 5 aa, Artificial Sequence
  source: /note="Description of Artificial Sequence: Synthetic peptide"
GYYIH

SEQ ID NO: 1211 - protein, 5 aa, Artificial Sequence
  source: /note="Description of Artificial Sequence: Synthetic peptide"
GYYIH

SEQ ID NO: 1212 - protein, 5 aa, Artificial Sequence
  source: /note="Description of Artificial Sequence: Synthetic peptide"
GYYIH

SEQ ID NO: 1213 - protein, 5 aa, Artificial Sequence
  source: /note="Description of Artificial Sequence: Synthetic peptide"
GYYIH

SEQ ID NO: 1214 - protein, 5 aa, Artificial Sequence
  source: /note="Description of Artificial Sequence: Synthetic peptide"
GYYIH

SEQ ID NO: 1215 - protein, 5 aa, Artificial Sequence
  source: /note="Description of Artificial Sequence: Synthetic peptide"
GYYIH

SEQ ID NO: 1216 - protein, 5 aa, Artificial Sequence
  source: /note="Description of Artificial Sequence: Synthetic peptide"
GYYIH

SEQ ID NO: 1217 - protein, 5 aa, Artificial Sequence
  source: /note="Description of Artificial Sequence: Synthetic peptide"
GYYIH

SEQ ID NO: 1218 - protein, 5 aa, Artificial Sequence
  source: /note="Description of Artificial Sequence: Synthetic peptide"
GYYIH

SEQ ID NO: 1219 - protein, 5 aa, Artificial Sequence
  source: /note="Description of Artificial Sequence: Synthetic peptide"
GYYIH

SEQ ID NO: 1220 - protein, 5 aa, Artificial Sequence
  source: /note="Description of Artificial Sequence: Synthetic peptide"
GYYIH

SEQ ID NO: 1221 - protein, 5 aa, Artificial Sequence
  source: /note="Description of Artificial Sequence: Synthetic peptide"
GYYIH

SEQ ID NO: 1222 - protein, 5 aa, Artificial Sequence
  source: /note="Description of Artificial Sequence: Synthetic peptide"
GYYIH

SEQ ID NO: 1223 - protein, 5 aa, Artificial Sequence
  source: /note="Description of Artificial Sequence: Synthetic peptide"
GYYMH

SEQ ID NO: 1224 - protein, 5 aa, Artificial Sequence
  source: /note="Description of Artificial Sequence: Synthetic peptide"
GYYMH

SEQ ID NO: 1225 - protein, 5 aa, Artificial Sequence
  source: /note="Description of Artificial Sequence: Synthetic peptide"
GYYMH

SEQ ID NO: 1226 - protein, 5 aa, Artificial Sequence
  source: /note="Description of Artificial Sequence: Synthetic peptide"
GYYMH

SEQ ID NO: 1227 - protein, 5 aa, Artificial Sequence
  source: /note="Description of Artificial Sequence: Synthetic peptide"
GYYMH

SEQ ID NO: 1228 - protein, 5 aa, Artificial Sequence
  source: /note="Description of Artificial Sequence: Synthetic peptide"
GYYMH

SEQ ID NO: 1229 - protein, 5 aa, Artificial Sequence
  source: /note="Description of Artificial Sequence: Synthetic peptide"
GYYMH

SEQ ID NO: 1230 - protein, 5 aa, Artificial Sequence
  source: /note="Description of Artificial Sequence: Synthetic peptide"
GYYMH

SEQ ID NO: 1231 - protein, 5 aa, Artificial Sequence
  source: /note="Description of Artificial Sequence: Synthetic peptide"
GYYMH

SEQ ID NO: 1232 - protein, 5 aa, Artificial Sequence
  source: /note="Description of Artificial Sequence: Synthetic peptide"
GYYMH

SEQ ID NO: 1233 - protein, 5 aa, Artificial Sequence
  source: /note="Description of Artificial Sequence: Synthetic peptide"
GYYMH

SEQ ID NO: 1234 - protein, 5 aa, Artificial Sequence
  source: /note="Description of Artificial Sequence: Synthetic peptide"
GYYMH

SEQ ID NO: 1235 - protein, 5 aa, Artificial Sequence
  source: /note="Description of Artificial Sequence: Synthetic peptide"
GYYMH

SEQ ID NO: 1236 - protein, 5 aa, Artificial Sequence
  source: /note="Description of Artificial Sequence: Synthetic peptide"
GYYMH

SEQ ID NO: 1237 - protein, 5 aa, Artificial Sequence
  source: /note="Description of Artificial Sequence: Synthetic peptide"
NFGMH

SEQ ID NO: 1238 - protein, 5 aa, Artificial Sequence
  source: /note="Description of Artificial Sequence: Synthetic peptide"
YFGMH

SEQ ID NO: 1239 - protein, 5 aa, Artificial Sequence
  source: /note="Description of Artificial Sequence: Synthetic peptide"
GYYMH

SEQ ID NO: 1240 - protein, 5 aa, Artificial Sequence
  source: /note="Description of Artificial Sequence: Synthetic peptide"
SYGIH

SEQ ID NO: 1241 - protein, 5 aa, Artificial Sequence
  source: /note="Description of Artificial Sequence: Synthetic peptide"
SYDIN

SEQ ID NO: 1242 - protein, 5 aa, Artificial Sequence
  source: /note="Description of Artificial Sequence: Synthetic peptide"
SYGIH

SEQ ID NO: 1243 - protein, 5 aa, Artificial Sequence
  source: /note="Description of Artificial Sequence: Synthetic peptide"
SYGIH

SEQ ID NO: 1244 - protein, 5 aa, Artificial Sequence
  source: /note="Description of Artificial Sequence: Synthetic peptide"
SYGIH

SEQ ID NO: 1245 - protein, 5 aa, Artificial Sequence
  source: /note="Description of Artificial Sequence: Synthetic peptide"
SYGIH

SEQ ID NO: 1246 - protein, 5 aa, Artificial Sequence
  source: /note="Description of Artificial Sequence: Synthetic peptide"
SYGIH

SEQ ID NO: 1247 - protein, 5 aa, Artificial Sequence
  source: /note="Description of Artificial Sequence: Synthetic peptide"
SYGIH

SEQ ID NO: 1248 - protein, 5 aa, Artificial Sequence
  source: /note="Description of Artificial Sequence: Synthetic peptide"
SYDIN

SEQ ID NO: 1249 - protein, 5 aa, Artificial Sequence
  source: /note="Description of Artificial Sequence: Synthetic peptide"
SYDIN

SEQ ID NO: 1250 - protein, 5 aa, Artificial Sequence
  source: /note="Description of Artificial Sequence: Synthetic peptide"
SYDIN

SEQ ID NO: 1251 - protein, 5 aa, Artificial Sequence
  source: /note="Description of Artificial Sequence: Synthetic peptide"
SYDIN

SEQ ID NO: 1252 - protein, 5 aa, Artificial Sequence
  source: /note="Description of Artificial Sequence: Synthetic peptide"
SYDIN

SEQ ID NO: 1253 - protein, 5 aa, Artificial Sequence
  source: /note="Description of Artificial Sequence: Synthetic peptide"
SYDIN

SEQ ID NO: 1254 - protein, 5 aa, Artificial Sequence
  source: /note="Description of Artificial Sequence: Synthetic peptide"
SYDIN

SEQ ID NO: 1255 - protein, 5 aa, Artificial Sequence
  source: /note="Description of Artificial Sequence: Synthetic peptide"
SYDIN

SEQ ID NO: 1256 - protein, 5 aa, Artificial Sequence
  source: /note="Description of Artificial Sequence: Synthetic peptide"
SYGIH

SEQ ID NO: 1257 - protein, 17 aa, Artificial Sequence
  source: /note="Description of Artificial Sequence: Synthetic peptide"
WINPNSGGTNYAQKFQG

SEQ ID NO: 1258 - protein, 17 aa, Artificial Sequence
  source: /note="Description of Artificial Sequence: Synthetic peptide"
VIWYDGSNENYADSVKG

SEQ ID NO: 1259 - protein, 17 aa, Artificial Sequence
  source: /note="Description of Artificial Sequence: Synthetic peptide"
VIWYDGSNKYYADSVKG

SEQ ID NO: 1260 - protein, 17 aa, Artificial Sequence
  source: /note="Description of Artificial Sequence: Synthetic peptide"
VIWYDGSNKYYADSVKG

SEQ ID NO: 1261 - protein, 17 aa, Artificial Sequence
  source: /note="Description of Artificial Sequence: Synthetic peptide"
WINPDSGGTDYSQRFQG

SEQ ID NO: 1262 - protein, 17 aa, Artificial Sequence
  source: /note="Description of Artificial Sequence: Synthetic peptide"
WINPDSGGTDYSQRFQG

SEQ ID NO: 1263 - protein, 17 aa, Artificial Sequence
  source: /note="Description of Artificial Sequence: Synthetic peptide"
WISPNSGDTSYAQKFQD

SEQ ID NO: 1264 - protein, 17 aa, Artificial Sequence
  source: /note="Description of Artificial Sequence: Synthetic peptide"
WISPNNGDTNYAQKFQD

SEQ ID NO: 1265 - protein, 16 aa, Artificial Sequence
  source: /note="Description of Artificial Sequence: Synthetic peptide"
YIYYSGSTYYNPSLKS

SEQ ID NO: 1266 - protein, 17 aa, Artificial Sequence
  source: /note="Description of Artificial Sequence: Synthetic peptide"
AIWFDGSDKYYADSVKG

SEQ ID NO: 1267 - protein, 17 aa, Artificial Sequence
  source: /note="Description of Artificial Sequence: Synthetic peptide"
VIWYDGSNKYYADSVKG

SEQ ID NO: 1268 - protein, 17 aa, Artificial Sequence
  source: /note="Description of Artificial Sequence: Synthetic peptide"
AIWYDGNNKYYADSVKG

SEQ ID NO: 1269 - protein, 16 aa, Artificial Sequence
  source: /note="Description of Artificial Sequence: Synthetic peptide"
RIYTSGSTNYNPSLKS

SEQ ID NO: 1270 - protein, 16 aa, Artificial Sequence
  source: /note="Description of Artificial Sequence: Synthetic peptide"
RIYTSGSTNYNPSLKS

SEQ ID NO: 1271 - protein, 17 aa, Artificial Sequence
  source: /note="Description of Artificial Sequence: Synthetic peptide"
VIWYDASNKYYADAVKG

SEQ ID NO: 1272 - protein, 17 aa, Artificial Sequence
  source: /note="Description of Artificial Sequence: Synthetic peptide"
VIWYDASNKYYADSVKG

SEQ ID NO: 1273 - protein, 17 aa, Artificial Sequence
  source: /note="Description of Artificial Sequence: Synthetic peptide"
VIWYDGSNKYYADAVKG

SEQ ID NO: 1274 - protein, 17 aa, Artificial Sequence
  source: /note="Description of Artificial Sequence: Synthetic peptide"
VIWYDASNKYYADAVKG

SEQ ID NO: 1275 - protein, 17 aa, Artificial Sequence
  source: /note="Description of Artificial Sequence: Synthetic peptide"
VIWYDASNKYYADAVKG

SEQ ID NO: 1276 - protein, 17 aa, Artificial Sequence
  source: /note="Description of Artificial Sequence: Synthetic peptide"
VIWYDASNKYYADAVKG

SEQ ID NO: 1277 - protein, 17 aa, Artificial Sequence
  source: /note="Description of Artificial Sequence: Synthetic peptide"
VIWYDASNENYADAVKG

SEQ ID NO: 1278 - protein, 17 aa, Artificial Sequence
  source: /note="Description of Artificial Sequence: Synthetic peptide"
VIWYDASNENYADAVKG

SEQ ID NO: 1279 - protein, 17 aa, Artificial Sequence
  source: /note="Description of Artificial Sequence: Synthetic peptide"
VIWYDASNENYADAVKG

SEQ ID NO: 1280 - protein, 17 aa, Artificial Sequence
  source: /note="Description of Artificial Sequence: Synthetic peptide"
VIWYDASNENYADSVKG

SEQ ID NO: 1281 - protein, 17 aa, Artificial Sequence
  source: /note="Description of Artificial Sequence: Synthetic peptide"
VIWYDGSNENYADAVKG

SEQ ID NO: 1282 - protein, 17 aa, Artificial Sequence
  source: /note="Description of Artificial Sequence: Synthetic peptide"
VIWYDASNENYADAVKG

SEQ ID NO: 1283 - protein, 17 aa, Artificial Sequence
  source: /note="Description of Artificial Sequence: Synthetic peptide"
VIWYDASNENYADAVKG

SEQ ID NO: 1284 - protein, 17 aa, Artificial Sequence
  source: /note="Description of Artificial Sequence: Synthetic peptide"
VIWYDGSNENYADSVKG

SEQ ID NO: 1285 - protein, 17 aa, Artificial Sequence
  source: /note="Description of Artificial Sequence: Synthetic peptide"
VIWYDASNENYADAVKG

SEQ ID NO: 1286 - protein, 17 aa, Artificial Sequence
  source: /note="Description of Artificial Sequence: Synthetic peptide"
VIWYDASNENYADAVKG

SEQ ID NO: 1287 - protein, 17 aa, Artificial Sequence
  source: /note="Description of Artificial Sequence: Synthetic peptide"
VIWYDASNENYADAVKG

SEQ ID NO: 1288 - protein, 17 aa, Artificial Sequence
  source: /note="Description of Artificial Sequence: Synthetic peptide"
VIWYDASNENYADAVKG

SEQ ID NO: 1289 - protein, 17 aa, Artificial Sequence
  source: /note="Description of Artificial Sequence: Synthetic peptide"
VIWYDASNENYADAVKG

SEQ ID NO: 1290 - protein, 17 aa, Artificial Sequence
  source: /note="Description of Artificial Sequence: Synthetic peptide"
VIWYDASNENYADAVKG

SEQ ID NO: 1291 - protein, 17 aa, Artificial Sequence
  source: /note="Description of Artificial Sequence: Synthetic peptide"
VIWYDASNENYADAVKG

SEQ ID NO: 1292 - protein, 17 aa, Artificial Sequence
  source: /note="Description of Artificial Sequence: Synthetic peptide"
VIWYDGSNENYADAVKG

SEQ ID NO: 1293 - protein, 17 aa, Artificial Sequence
  source: /note="Description of Artificial Sequence: Synthetic peptide"
VIWYDASNENYADSVKG

SEQ ID NO: 1294 - protein, 17 aa, Artificial Sequence
  source: /note="Description of Artificial Sequence: Synthetic peptide"
VIWYDASNENYADAVKG

SEQ ID NO: 1295 - protein, 17 aa, Artificial Sequence
  source: /note="Description of Artificial Sequence: Synthetic peptide"
VIWYDASNENYADAVKG

SEQ ID NO: 1296 - protein, 17 aa, Artificial Sequence
  source: /note="Description of Artificial Sequence: Synthetic peptide"
VIWYDASNKYYADAVKG

SEQ ID NO: 1297 - protein, 17 aa, Artificial Sequence
  source: /note="Description of Artificial Sequence: Synthetic peptide"
VIWYDASNKYYADAVKG

SEQ ID NO: 1298 - protein, 17 aa, Artificial Sequence
  source: /note="Description of Artificial Sequence: Synthetic peptide"
VIWYDASNKYYADAVKG

SEQ ID NO: 1299 - protein, 17 aa, Artificial Sequence
  source: /note="Description of Artificial Sequence: Synthetic peptide"
VIWYDASNKYYADAVKG

SEQ ID NO: 1300 - protein, 17 aa, Artificial Sequence
  source: /note="Description of Artificial Sequence: Synthetic peptide"
VIWYDASNKYYADAVKG

SEQ ID NO: 1301 - protein, 17 aa, Artificial Sequence
  source: /note="Description of Artificial Sequence: Synthetic peptide"
VIWYDASNKYYADAVKG

SEQ ID NO: 1302 - protein, 17 aa, Artificial Sequence
  source: /note="Description of Artificial Sequence: Synthetic peptide"
VIWYDASNKYYADAVKG

SEQ ID NO: 1303 - protein, 17 aa, Artificial Sequence
  source: /note="Description of Artificial Sequence: Synthetic peptide"
VIWYDASNKYYADSVKG

SEQ ID NO: 1304 - protein, 17 aa, Artificial Sequence
  source: /note="Description of Artificial Sequence: Synthetic peptide"
VIWYDGSNKYYADAVKG

SEQ ID NO: 1305 - protein, 17 aa, Artificial Sequence
  source: /note="Description of Artificial Sequence: Synthetic peptide"
VIWYDASNKYYADAVKG

SEQ ID NO: 1306 - protein, 17 aa, Artificial Sequence
  source: /note="Description of Artificial Sequence: Synthetic peptide"
VIWYDASNKYYADAVKG

SEQ ID NO: 1307 - protein, 17 aa, Artificial Sequence
  source: /note="Description of Artificial Sequence: Synthetic peptide"
VIWYDASNKYYADAVKG

SEQ ID NO: 1308 - protein, 17 aa, Artificial Sequence
  source: /note="Description of Artificial Sequence: Synthetic peptide"
VIWYDASNKYYADAVKG

SEQ ID NO: 1309 - protein, 17 aa, Artificial Sequence
  source: /note="Description of Artificial Sequence: Synthetic peptide"
VIWYDGSNKYYADSVKG

SEQ ID NO: 1310 - protein, 17 aa, Artificial Sequence
  source: /note="Description of Artificial Sequence: Synthetic peptide"
VIWYDASNKYYADSVKG

SEQ ID NO: 1311 - protein, 17 aa, Artificial Sequence
  source: /note="Description of Artificial Sequence: Synthetic peptide"
VIWYDGSNKYYADAVKG

SEQ ID NO: 1312 - protein, 17 aa, Artificial Sequence
  source: /note="Description of Artificial Sequence: Synthetic peptide"
AIWYDANNKYYADAVKG

SEQ ID NO: 1313 - protein, 17 aa, Artificial Sequence
  source: /note="Description of Artificial Sequence: Synthetic peptide"
AIWYDANNKYYADAVKG

SEQ ID NO: 1314 - protein, 17 aa, Artificial Sequence
  source: /note="Description of Artificial Sequence: Synthetic peptide"
AIWYDANNKYYADAVKG

SEQ ID NO: 1315 - protein, 17 aa, Artificial Sequence
  source: /note="Description of Artificial Sequence: Synthetic peptide"
AIWYDANNKYYADAVKG

SEQ ID NO: 1316 - protein, 17 aa, Artificial Sequence
  source: /note="Description of Artificial Sequence: Synthetic peptide"
AIWYDANNKYYADAVKG

SEQ ID NO: 1317 - protein, 17 aa, Artificial Sequence
  source: /note="Description of Artificial Sequence: Synthetic peptide"
AIWYDANNKYYADAVKG

SEQ ID NO: 1318 - protein, 17 aa, Artificial Sequence
  source: /note="Description of Artificial Sequence: Synthetic peptide"
AIWYDANNKYYADAVKG

SEQ ID NO: 1319 - protein, 17 aa, Artificial Sequence
  source: /note="Description of Artificial Sequence: Synthetic peptide"
AIWYDGNNKYYADAVKG

SEQ ID NO: 1320 - protein, 17 aa, Artificial Sequence
  source: /note="Description of Artificial Sequence: Synthetic peptide"
AIWYDANNKYYADSVKG

SEQ ID NO: 1321 - protein, 17 aa, Artificial Sequence
  source: /note="Description of Artificial Sequence: Synthetic peptide"
AIWYDANNKYYADAVKG

SEQ ID NO: 1322 - protein, 17 aa, Artificial Sequence
  source: /note="Description of Artificial Sequence: Synthetic peptide"
AIWYDANNKYYADAVKG

SEQ ID NO: 1323 - protein, 17 aa, Artificial Sequence
  source: /note="Description of Artificial Sequence: Synthetic peptide"
VIWYDASNKYYEDAVKG

SEQ ID NO: 1324 - protein, 17 aa, Artificial Sequence
  source: /note="Description of Artificial Sequence: Synthetic peptide"
VIWYDGSNKYYEDSVKG

SEQ ID NO: 1325 - protein, 17 aa, Artificial Sequence
  source: /note="Description of Artificial Sequence: Synthetic peptide"
VIWYDGSNKYYEDAVKG

SEQ ID NO: 1326 - protein, 17 aa, Artificial Sequence
  source: /note="Description of Artificial Sequence: Synthetic peptide"
VIWYDASNKYYEDSVKG

SEQ ID NO: 1327 - protein, 17 aa, Artificial Sequence
  source: /note="Description of Artificial Sequence: Synthetic peptide"
AIWFDASDKYYADAVKG

SEQ ID NO: 1328 - protein, 17 aa, Artificial Sequence
  source: /note="Description of Artificial Sequence: Synthetic peptide"
AIWFDASDKYYADSVKG

SEQ ID NO: 1329 - protein, 17 aa, Artificial Sequence
  source: /note="Description of Artificial Sequence: Synthetic peptide"
AIWFDGSDKYYADAVKG

SEQ ID NO: 1330 - protein, 17 aa, Artificial Sequence
  source: /note="Description of Artificial Sequence: Synthetic peptide"
AIWFDASDKYYADAVKG

SEQ ID NO: 1331 - protein, 17 aa, Artificial Sequence
  source: /note="Description of Artificial Sequence: Synthetic peptide"
AIWFDASDKYYADAVKG

SEQ ID NO: 1332 - protein, 17 aa, Artificial Sequence
  source: /note="Description of Artificial Sequence: Synthetic peptide"
AIWFDASDKYYADAVKG

SEQ ID NO: 1333 - protein, 17 aa, Artificial Sequence
  source: /note="Description of Artificial Sequence: Synthetic peptide"
AIWFDASDKYYADAVKG

SEQ ID NO: 1334 - protein, 17 aa, Artificial Sequence
  source: /note="Description of Artificial Sequence: Synthetic peptide"
AIWFDASDKYYADAVKG

SEQ ID NO: 1335 - protein, 16 aa, Artificial Sequence
  source: /note="Description of Artificial Sequence: Synthetic peptide"
YIYYSGSTYYNPSLKS

SEQ ID NO: 1336 - protein, 16 aa, Artificial Sequence
  source: /note="Description of Artificial Sequence: Synthetic peptide"
YIYYSGSTYYNPSLKS

SEQ ID NO: 1337 - protein, 16 aa, Artificial Sequence
  source: /note="Description of Artificial Sequence: Synthetic peptide"
YIYYSGSTYYNPSLKS

SEQ ID NO: 1338 - protein, 16 aa, Artificial Sequence
  source: /note="Description of Artificial Sequence: Synthetic peptide"
YIYYSGSTYYNPSLKS

SEQ ID NO: 1339 - protein, 16 aa, Artificial Sequence
  source: /note="Description of Artificial Sequence: Synthetic peptide"
YIYYSGSTYYNPSLKS

SEQ ID NO: 1340 - protein, 16 aa, Artificial Sequence
  source: /note="Description of Artificial Sequence: Synthetic peptide"
YIYYSGSTYYNPSLKS

SEQ ID NO: 1341 - protein, 16 aa, Artificial Sequence
  source: /note="Description of Artificial Sequence: Synthetic peptide"
YIYYSGSTYYNPSLKS

SEQ ID NO: 1342 - protein, 17 aa, Artificial Sequence
  source: /note="Description of Artificial Sequence: Synthetic peptide"
WINPESGGTDYSQRFQG

SEQ ID NO: 1343 - protein, 17 aa, Artificial Sequence
  source: /note="Description of Artificial Sequence: Synthetic peptide"
WINPESGGTDYSQRFQG

SEQ ID NO: 1344 - protein, 17 aa, Artificial Sequence
  source: /note="Description of Artificial Sequence: Synthetic peptide"
WINPDAGGTDYSQRFQG

SEQ ID NO: 1345 - protein, 17 aa, Artificial Sequence
  source: /note="Description of Artificial Sequence: Synthetic peptide"
WINPDAGGTDYSQRFQG

SEQ ID NO: 1346 - protein, 17 aa, Artificial Sequence
  source: /note="Description of Artificial Sequence: Synthetic peptide"
WINPDSGGTDYSQRFQG

SEQ ID NO: 1347 - protein, 17 aa, Artificial Sequence
  source: /note="Description of Artificial Sequence: Synthetic peptide"
WINPDSGGTDYSQRFQG

SEQ ID NO: 1348 - protein, 17 aa, Artificial Sequence
  source: /note="Description of Artificial Sequence: Synthetic peptide"
WINPDSGGTDYSQRFQG

SEQ ID NO: 1349 - protein, 17 aa, Artificial Sequence
  source: /note="Description of Artificial Sequence: Synthetic peptide"
WINPDAGGTDYSQRFQG

SEQ ID NO: 1350 - protein, 17 aa, Artificial Sequence
  source: /note="Description of Artificial Sequence: Synthetic peptide"
WINPDAGGTDYSQRFQG

SEQ ID NO: 1351 - protein, 17 aa, Artificial Sequence
  source: /note="Description of Artificial Sequence: Synthetic peptide"
WINPDAGGTDYSQRFQG

SEQ ID NO: 1352 - protein, 17 aa, Artificial Sequence
  source: /note="Description of Artificial Sequence: Synthetic peptide"
WINPESGGTDYSQRFQG

SEQ ID NO: 1353 - protein, 17 aa, Artificial Sequence
  source: /note="Description of Artificial Sequence: Synthetic peptide"
WISPNSGETSYAQKFQD

SEQ ID NO: 1354 - protein, 17 aa, Artificial Sequence
  source: /note="Description of Artificial Sequence: Synthetic peptide"
WISPNSGDTSYAQKFQD

SEQ ID NO: 1355 - protein, 17 aa, Artificial Sequence
  source: /note="Description of Artificial Sequence: Synthetic peptide"
WISPNSGETSYAQKFQD

SEQ ID NO: 1356 - protein, 17 aa, Artificial Sequence
  source: /note="Description of Artificial Sequence: Synthetic peptide"
WISPNSGETSYAQKFQD

SEQ ID NO: 1357 - protein, 17 aa, Artificial Sequence
  source: /note="Description of Artificial Sequence: Synthetic peptide"
WISPNSGDTSYAQKFQD

SEQ ID NO: 1358 - protein, 17 aa, Artificial Sequence
  source: /note="Description of Artificial Sequence: Synthetic peptide"
WISPNSGETSYAQKFQD

SEQ ID NO: 1359 - protein, 17 aa, Artificial Sequence
  source: /note="Description of Artificial Sequence: Synthetic peptide"
WISPNSGDTSYAQKFQD

SEQ ID NO: 1360 - protein, 17 aa, Artificial Sequence
  source: /note="Description of Artificial Sequence: Synthetic peptide"
WISPNSGETSYAQKFQD

SEQ ID NO: 1361 - protein, 17 aa, Artificial Sequence
  source: /note="Description of Artificial Sequence: Synthetic peptide"
WISPNSGETSYAQKFQD

SEQ ID NO: 1362 - protein, 17 aa, Artificial Sequence
  source: /note="Description of Artificial Sequence: Synthetic peptide"
WINPESGGTDYSQRFQG

SEQ ID NO: 1363 - protein, 17 aa, Artificial Sequence
  source: /note="Description of Artificial Sequence: Synthetic peptide"
WINPESGGTDYSQRFQG

SEQ ID NO: 1364 - protein, 17 aa, Artificial Sequence
  source: /note="Description of Artificial Sequence: Synthetic peptide"
WINPDSGGTDYSQRFQG

SEQ ID NO: 1365 - protein, 17 aa, Artificial Sequence
  source: /note="Description of Artificial Sequence: Synthetic peptide"
WINPESGGTDYSQRFQG

SEQ ID NO: 1366 - protein, 17 aa, Artificial Sequence
  source: /note="Description of Artificial Sequence: Synthetic peptide"
WINPESGGTDYSQRFQG

SEQ ID NO: 1367 - protein, 17 aa, Artificial Sequence
  source: /note="Description of Artificial Sequence: Synthetic peptide"
WISPNQGETNYAQKFQD

SEQ ID NO: 1368 - protein, 17 aa, Artificial Sequence
  source: /note="Description of Artificial Sequence: Synthetic peptide"
WISPNQGDTNYAQKFQD

SEQ ID NO: 1369 - protein, 17 aa, Artificial Sequence
  source: /note="Description of Artificial Sequence: Synthetic peptide"
WISPNQGETNYAQKFQD

SEQ ID NO: 1370 - protein, 17 aa, Artificial Sequence
  source: /note="Description of Artificial Sequence: Synthetic peptide"
WISPNNGETNYAQKFQD

SEQ ID NO: 1371 - protein, 17 aa, Artificial Sequence
  source: /note="Description of Artificial Sequence: Synthetic peptide"
WISPNNGDTNYAQKFQD

SEQ ID NO: 1372 - protein, 17 aa, Artificial Sequence
  source: /note="Description of Artificial Sequence: Synthetic peptide"
WISPNQGDTNYAQKFQD

SEQ ID NO: 1373 - protein, 17 aa, Artificial Sequence
  source: /note="Description of Artificial Sequence: Synthetic peptide"
WISPNNGETNYAQKFQD

SEQ ID NO: 1374 - protein, 17 aa, Artificial Sequence
  source: /note="Description of Artificial Sequence: Synthetic peptide"
WISPNQGETNYAQKFQD

SEQ ID NO: 1375 - protein, 17 aa, Artificial Sequence
  source: /note="Description of Artificial Sequence: Synthetic peptide"
WISPNNGDTNYAQKFQD

SEQ ID NO: 1376 - protein, 17 aa, Artificial Sequence
  source: /note="Description of Artificial Sequence: Synthetic peptide"
WISPNQGDTNYAQKFQD

SEQ ID NO: 1377 - protein, 17 aa, Artificial Sequence
  source: /note="Description of Artificial Sequence: Synthetic peptide"
WISPNNGETNYAQKFQD

SEQ ID NO: 1378 - protein, 17 aa, Artificial Sequence
  source: /note="Description of Artificial Sequence: Synthetic peptide"
WISPNQGETNYAQKFQD

SEQ ID NO: 1379 - protein, 17 aa, Artificial Sequence
  source: /note="Description of Artificial Sequence: Synthetic peptide"
WISPNQGETNYAQKFQD

SEQ ID NO: 1380 - protein, 17 aa, Artificial Sequence
  source: /note="Description of Artificial Sequence: Synthetic peptide"
WINPNSGGTNYAQKFQG

SEQ ID NO: 1381 - protein, 17 aa, Artificial Sequence
  source: /note="Description of Artificial Sequence: Synthetic peptide"
WINPNSGGTNYAQKFQG

SEQ ID NO: 1382 - protein, 17 aa, Artificial Sequence
  source: /note="Description of Artificial Sequence: Synthetic peptide"
WINPNSGGTNYAQKFQG

SEQ ID NO: 1383 - protein, 17 aa, Artificial Sequence
  source: /note="Description of Artificial Sequence: Synthetic peptide"
WINPNSGGTNYAQKFQG

SEQ ID NO: 1384 - protein, 17 aa, Artificial Sequence
  source: /note="Description of Artificial Sequence: Synthetic peptide"
WINPNSGGTNYAQKFQG

SEQ ID NO: 1385 - protein, 17 aa, Artificial Sequence
  source: /note="Description of Artificial Sequence: Synthetic peptide"
WINPNSGGTNYAQKFQG

SEQ ID NO: 1386 - protein, 17 aa, Artificial Sequence
  source: /note="Description of Artificial Sequence: Synthetic peptide"
WINPNSGGTNYAQKFQG

SEQ ID NO: 1387 - protein, 17 aa, Artificial Sequence
  source: /note="Description of Artificial Sequence: Synthetic peptide"
WINPNSGGTNYAQKFQG

SEQ ID NO: 1388 - protein, 17 aa, Artificial Sequence
  source: /note="Description of Artificial Sequence: Synthetic peptide"
WINPNSGGTNYAQKFQG

SEQ ID NO: 1389 - protein, 17 aa, Artificial Sequence
  source: /note="Description of Artificial Sequence: Synthetic peptide"
WINPNSGGTNYAQKFQG

SEQ ID NO: 1390 - protein, 17 aa, Artificial Sequence
  source: /note="Description of Artificial Sequence: Synthetic peptide"
WINPNSGGTNYAQKFQG

SEQ ID NO: 1391 - protein, 17 aa, Artificial Sequence
  source: /note="Description of Artificial Sequence: Synthetic peptide"
WINPNSGGTNYAQKFQG

SEQ ID NO: 1392 - protein, 17 aa, Artificial Sequence
  source: /note="Description of Artificial Sequence: Synthetic peptide"
WINPNSGGTNYAQKFQG

SEQ ID NO: 1393 - protein, 17 aa, Artificial Sequence
  source: /note="Description of Artificial Sequence: Synthetic peptide"
WINPNSGGTNYAQKFQG

SEQ ID NO: 1394 - protein, 17 aa, Artificial Sequence
  source: /note="Description of Artificial Sequence: Synthetic peptide"
VIWYDASNENYADAVKG

SEQ ID NO: 1395 - protein, 17 aa, Artificial Sequence
  source: /note="Description of Artificial Sequence: Synthetic peptide"
VIWYDASNKYYADAVKG

SEQ ID NO: 1396 - protein, 17 aa, Artificial Sequence
  source: /note="Description of Artificial Sequence: Synthetic peptide"
WINPNSGGTNYAQKFQG

SEQ ID NO: 1397 - protein, 17 aa, Artificial Sequence
  source: /note="Description of Artificial Sequence: Synthetic peptide"
VIWYDGSNKFHADSVKG

SEQ ID NO: 1398 - protein, 17 aa, Artificial Sequence
  source: /note="Description of Artificial Sequence: Synthetic peptide"
WMNPNSGNTGYAQKFQG

SEQ ID NO: 1399 - protein, 17 aa, Artificial Sequence
  source: /note="Description of Artificial Sequence: Synthetic peptide"
VIWYDASNKFHADAVKG

SEQ ID NO: 1400 - protein, 17 aa, Artificial Sequence
  source: /note="Description of Artificial Sequence: Synthetic peptide"
VIWYDASNKFHADAVKG

SEQ ID NO: 1401 - protein, 17 aa, Artificial Sequence
  source: /note="Description of Artificial Sequence: Synthetic peptide"
VIWYDASNKFHADAVKG

SEQ ID NO: 1402 - protein, 17 aa, Artificial Sequence
  source: /note="Description of Artificial Sequence: Synthetic peptide"
VIWYDASNKFHADAVKG

SEQ ID NO: 1403 - protein, 17 aa, Artificial Sequence
  source: /note="Description of Artificial Sequence: Synthetic peptide"
VIWYDASNKFHADSVKG

SEQ ID NO: 1404 - protein, 17 aa, Artificial Sequence
  source: /note="Description of Artificial Sequence: Synthetic peptide"
VIWYDGSNKFHADAVKG

SEQ ID NO: 1405 - protein, 17 aa, Artificial Sequence
  source: /note="Description of Artificial Sequence: Synthetic peptide"
WMNPNSGGTGYAQKFQG

SEQ ID NO: 1406 - protein, 17 aa, Artificial Sequence
  source: /note="Description of Artificial Sequence: Synthetic peptide"
WMNPNSGNTGYAQKFQG

SEQ ID NO: 1407 - protein, 17 aa, Artificial Sequence
  source: /note="Description of Artificial Sequence: Synthetic peptide"
WMNPNSGGTGYAQKFQG

SEQ ID NO: 1408 - protein, 17 aa, Artificial Sequence
  source: /note="Description of Artificial Sequence: Synthetic peptide"
WMNPNSGGTGYAQKFQG

SEQ ID NO: 1409 - protein, 17 aa, Artificial Sequence
  source: /note="Description of Artificial Sequence: Synthetic peptide"
WMNPNSGGTGYAQKFQG

SEQ ID NO: 1410 - protein, 17 aa, Artificial Sequence
  source: /note="Description of Artificial Sequence: Synthetic peptide"
WMNPNSGNTGYAQKFQG

SEQ ID NO: 1411 - protein, 17 aa, Artificial Sequence
  source: /note="Description of Artificial Sequence: Synthetic peptide"
WMNPNSGGTGYAQKFQG

SEQ ID NO: 1412 - protein, 17 aa, Artificial Sequence
  source: /note="Description of Artificial Sequence: Synthetic peptide"
WMNPNSGGTGYAQKFQG

SEQ ID NO: 1413 - protein, 17 aa, Artificial Sequence
  source: /note="Description of Artificial Sequence: Synthetic peptide"
VIWYDASNKFHADAVKG

SEQ ID NO: 1414 - protein, 19 aa, Artificial Sequence
  source: /note="Description of Artificial Sequence: Synthetic peptide"
GGDYVWGTYRPHYYYGMDV

SEQ ID NO: 1415 - protein, 12 aa, Artificial Sequence
  source: /note="Description of Artificial Sequence: Synthetic peptide"
DGTIFGVVLGDY

SEQ ID NO: 1416 - protein, 12 aa, Artificial Sequence
  source: /note="Description of Artificial Sequence: Synthetic peptide"
DGTIFGVLLGDY

SEQ ID NO: 1417 - protein, 11 aa, Artificial Sequence
  source: /note="Description of Artificial Sequence: Synthetic peptide"
DRTIFGVVLDY

SEQ ID NO: 1418 - protein, 14 aa, Artificial Sequence
  source: /note="Description of Artificial Sequence: Synthetic peptide"
EATIFGMVIVPFDY

SEQ ID NO: 1419 - protein, 14 aa, Artificial Sequence
  source: /note="Description of Artificial Sequence: Synthetic peptide"
EATIFGMVIVPFDY

SEQ ID NO: 1420 - protein, 14 aa, Artificial Sequence
  source: /note="Description of Artificial Sequence: Synthetic peptide"
EATIFGMLIVPFDY

SEQ ID NO: 1421 - protein, 14 aa, Artificial Sequence
  source: /note="Description of Artificial Sequence: Synthetic peptide"
EATIFGMLIVPFDY

SEQ ID NO: 1422 - protein, 16 aa, Artificial Sequence
  source: /note="Description of Artificial Sequence: Synthetic peptide"
DRITIFGVVMGGGMDV

SEQ ID NO: 1423 - protein, 11 aa, Artificial Sequence
  source: /note="Description of Artificial Sequence: Synthetic peptide"
DQAIFGVVPDY

SEQ ID NO: 1424 - protein, 12 aa, Artificial Sequence
  source: /note="Description of Artificial Sequence: Synthetic peptide"
DGTIFGVLLGDY

SEQ ID NO: 1425 - protein, 11 aa, Artificial Sequence
  source: /note="Description of Artificial Sequence: Synthetic peptide"
DRTIFGVVLEY

SEQ ID NO: 1426 - protein, 9 aa, Artificial Sequence
  source: /note="Description of Artificial Sequence: Synthetic peptide"
DVAVAGFDY

SEQ ID NO: 1427 - protein, 9 aa, Artificial Sequence
  source: /note="Description of Artificial Sequence: Synthetic peptide"
DVAVAGFDY

SEQ ID NO: 1428 - protein, 12 aa, Artificial Sequence
  source: /note="Description of Artificial Sequence: Synthetic peptide"
DGTIFGVLLGDY

SEQ ID NO: 1429 - protein, 12 aa, Artificial Sequence
  source: /note="Description of Artificial Sequence: Synthetic peptide"
DGTIFGVLLGDY

SEQ ID NO: 1430 - protein, 12 aa, Artificial Sequence
  source: /note="Description of Artificial Sequence: Synthetic peptide"
DGTIFGVLLGDY

SEQ ID NO: 1431 - protein, 12 aa, Artificial Sequence
  source: /note="Description of Artificial Sequence: Synthetic peptide"
DGTIFGVLLGDY

SEQ ID NO: 1432 - protein, 12 aa, Artificial Sequence
  source: /note="Description of Artificial Sequence: Synthetic peptide"
DGTIFGVLLGDY

SEQ ID NO: 1433 - protein, 12 aa, Artificial Sequence
  source: /note="Description of Artificial Sequence: Synthetic peptide"
DRTIFGVLLGDY

SEQ ID NO: 1434 - protein, 12 aa, Artificial Sequence
  source: /note="Description of Artificial Sequence: Synthetic peptide"
DGTIFGVVLGDY

SEQ ID NO: 1435 - protein, 12 aa, Artificial Sequence
  source: /note="Description of Artificial Sequence: Synthetic peptide"
DGTIFGVVLGDY

SEQ ID NO: 1436 - protein, 12 aa, Artificial Sequence
  source: /note="Description of Artificial Sequence: Synthetic peptide"
DGTIFGVVLGDY

SEQ ID NO: 1437 - protein, 12 aa, Artificial Sequence
  source: /note="Description of Artificial Sequence: Synthetic peptide"
DGTIFGVVLGDY

SEQ ID NO: 1438 - protein, 12 aa, Artificial Sequence
  source: /note="Description of Artificial Sequence: Synthetic peptide"
DGTIFGVVLGDY

SEQ ID NO: 1439 - protein, 12 aa, Artificial Sequence
  source: /note="Description of Artificial Sequence: Synthetic peptide"
DRTIFGVVLGDY

SEQ ID NO: 1440 - protein, 12 aa, Artificial Sequence
  source: /note="Description of Artificial Sequence: Synthetic peptide"
DGTIFGVVLGDY

SEQ ID NO: 1441 - protein, 12 aa, Artificial Sequence
  source: /note="Description of Artificial Sequence: Synthetic peptide"
DGTIFGVVLGDY

SEQ ID NO: 1442 - protein, 12 aa, Artificial Sequence
  source: /note="Description of Artificial Sequence: Synthetic peptide"
DGTIFGVVLGDY

SEQ ID NO: 1443 - protein, 12 aa, Artificial Sequence
  source: /note="Description of Artificial Sequence: Synthetic peptide"
DGTIFGVVLGDY

SEQ ID NO: 1444 - protein, 12 aa, Artificial Sequence
  source: /note="Description of Artificial Sequence: Synthetic peptide"
DGTIFGVVLGDY

SEQ ID NO: 1445 - protein, 12 aa, Artificial Sequence
  source: /note="Description of Artificial Sequence: Synthetic peptide"
DGTIFGVVLGDY

SEQ ID NO: 1446 - protein, 12 aa, Artificial Sequence
  source: /note="Description of Artificial Sequence: Synthetic peptide"
DGTIFGVVLGDY

SEQ ID NO: 1447 - protein, 12 aa, Artificial Sequence
  source: /note="Description of Artificial Sequence: Synthetic peptide"
DGTIFGVVLGDY

SEQ ID NO: 1448 - protein, 12 aa, Artificial Sequence
  source: /note="Description of Artificial Sequence: Synthetic peptide"
DGTIFGVVLGDY

SEQ ID NO: 1449 - protein, 12 aa, Artificial Sequence
  source: /note="Description of Artificial Sequence: Synthetic peptide"
DGTIFGVVLGDY

SEQ ID NO: 1450 - protein, 12 aa, Artificial Sequence
  source: /note="Description of Artificial Sequence: Synthetic peptide"
DGTIFGVVLGDY

SEQ ID NO: 1451 - protein, 12 aa, Artificial Sequence
  source: /note="Description of Artificial Sequence: Synthetic peptide"
DRTIFGVVLGDY

SEQ ID NO: 1452 - protein, 12 aa, Artificial Sequence
  source: /note="Description of Artificial Sequence: Synthetic peptide"
DGTIFGVVLGDY

SEQ ID NO: 1453 - protein, 11 aa, Artificial Sequence
  source: /note="Description of Artificial Sequence: Synthetic peptide"
DRTIFGVVLDY

SEQ ID NO: 1454 - protein, 11 aa, Artificial Sequence
  source: /note="Description of Artificial Sequence: Synthetic peptide"
DRTIFGVVLDY

SEQ ID NO: 1455 - protein, 11 aa, Artificial Sequence
  source: /note="Description of Artificial Sequence: Synthetic peptide"
DRTIFGVVLDY

SEQ ID NO: 1456 - protein, 11 aa, Artificial Sequence
  source: /note="Description of Artificial Sequence: Synthetic peptide"
DRTIFGVVLDY

SEQ ID NO: 1457 - protein, 11 aa, Artificial Sequence
  source: /note="Description of Artificial Sequence: Synthetic peptide"
DRTIFGVVLDY

SEQ ID NO: 1458 - protein, 11 aa, Artificial Sequence
  source: /note="Description of Artificial Sequence: Synthetic peptide"
DRTIFGVVLDY

SEQ ID NO: 1459 - protein, 11 aa, Artificial Sequence
  source: /note="Description of Artificial Sequence: Synthetic peptide"
DRTIFGVVLDY

SEQ ID NO: 1460 - protein, 11 aa, Artificial Sequence
  source: /note="Description of Artificial Sequence: Synthetic peptide"
DRTIFGVVLDY

SEQ ID NO: 1461 - protein, 11 aa, Artificial Sequence
  source: /note="Description of Artificial Sequence: Synthetic peptide"
DRTIFGVVLDY

SEQ ID NO: 1462 - protein, 12 aa, Artificial Sequence
  source: /note="Description of Artificial Sequence: Synthetic peptide"
DGTIFGVLLGDY

SEQ ID NO: 1463 - protein, 12 aa, Artificial Sequence
  source: /note="Description of Artificial Sequence: Synthetic peptide"
DRTIFGVLLGDY

SEQ ID NO: 1464 - protein, 12 aa, Artificial Sequence
  source: /note="Description of Artificial Sequence: Synthetic peptide"
DGTIFGVLLGDY

SEQ ID NO: 1465 - protein, 12 aa, Artificial Sequence
  source: /note="Description of Artificial Sequence: Synthetic peptide"
DRTIFGVLLGDY

SEQ ID NO: 1466 - protein, 12 aa, Artificial Sequence
  source: /note="Description of Artificial Sequence: Synthetic peptide"
DGTIFGVLLGDY

SEQ ID NO: 1467 - protein, 12 aa, Artificial Sequence
  source: /note="Description of Artificial Sequence: Synthetic peptide"
DGTIFGVLLGDY

SEQ ID NO: 1468 - protein, 12 aa, Artificial Sequence
  source: /note="Description of Artificial Sequence: Synthetic peptide"
DGTIFGVLLGDY

SEQ ID NO: 1469 - protein, 11 aa, Artificial Sequence
  source: /note="Description of Artificial Sequence: Synthetic peptide"
DRTIFGVVLEY

SEQ ID NO: 1470 - protein, 11 aa, Artificial Sequence
  source: /note="Description of Artificial Sequence: Synthetic peptide"
DRTIFGVVLEY

SEQ ID NO: 1471 - protein, 11 aa, Artificial Sequence
  source: /note="Description of Artificial Sequence: Synthetic peptide"
DRTIFGVVLEY

SEQ ID NO: 1472 - protein, 11 aa, Artificial Sequence
  source: /note="Description of Artificial Sequence: Synthetic peptide"
DRTIFGVVLEY

SEQ ID NO: 1473 - protein, 11 aa, Artificial Sequence
  source: /note="Description of Artificial Sequence: Synthetic peptide"
DRTIFGVVLEY

SEQ ID NO: 1474 - protein, 11 aa, Artificial Sequence
  source: /note="Description of Artificial Sequence: Synthetic peptide"
DRTIFGVVLEY

SEQ ID NO: 1475 - protein, 11 aa, Artificial Sequence
  source: /note="Description of Artificial Sequence: Synthetic peptide"
DRTIFGVVLEY

SEQ ID NO: 1476 - protein, 11 aa, Artificial Sequence
  source: /note="Description of Artificial Sequence: Synthetic peptide"
DRTIFGVVLEY

SEQ ID NO: 1477 - protein, 11 aa, Artificial Sequence
  source: /note="Description of Artificial Sequence: Synthetic peptide"
DRTIFGVVLEY

SEQ ID NO: 1478 - protein, 11 aa, Artificial Sequence
  source: /note="Description of Artificial Sequence: Synthetic peptide"
DRTIFGVVLEY

SEQ ID NO: 1479 - protein, 11 aa, Artificial Sequence
  source: /note="Description of Artificial Sequence: Synthetic peptide"
DRTIFGVVLEY

SEQ ID NO: 1480 - protein, 11 aa, Artificial Sequence
  source: /note="Description of Artificial Sequence: Synthetic peptide"
GITIFGHGFEY

SEQ ID NO: 1481 - protein, 11 aa, Artificial Sequence
  source: /note="Description of Artificial Sequence: Synthetic peptide"
GITIFGHGFEY

SEQ ID NO: 1482 - protein, 11 aa, Artificial Sequence
  source: /note="Description of Artificial Sequence: Synthetic peptide"
GITIFGHGFEY

SEQ ID NO: 1483 - protein, 11 aa, Artificial Sequence
  source: /note="Description of Artificial Sequence: Synthetic peptide"
GITIFGHGFEY

SEQ ID NO: 1484 - protein, 11 aa, Artificial Sequence
  source: /note="Description of Artificial Sequence: Synthetic peptide"
DQAIFGVVPDY

SEQ ID NO: 1485 - protein, 11 aa, Artificial Sequence
  source: /note="Description of Artificial Sequence: Synthetic peptide"
DQAIFGVVPDY

SEQ ID NO: 1486 - protein, 11 aa, Artificial Sequence
  source: /note="Description of Artificial Sequence: Synthetic peptide"
DQAIFGVVPDY

SEQ ID NO: 1487 - protein, 11 aa, Artificial Sequence
  source: /note="Description of Artificial Sequence: Synthetic peptide"
DQAIFGVVPDY

SEQ ID NO: 1488 - protein, 11 aa, Artificial Sequence
  source: /note="Description of Artificial Sequence: Synthetic peptide"
DQAIFGVVPDY

SEQ ID NO: 1489 - protein, 11 aa, Artificial Sequence
  source: /note="Description of Artificial Sequence: Synthetic peptide"
DQAIFGVVPDY

SEQ ID NO: 1490 - protein, 11 aa, Artificial Sequence
  source: /note="Description of Artificial Sequence: Synthetic peptide"
DQAIFGVVPDY

SEQ ID NO: 1491 - protein, 11 aa, Artificial Sequence
  source: /note="Description of Artificial Sequence: Synthetic peptide"
DQAIFGVVPDY

SEQ ID NO: 1492 - protein, 16 aa, Artificial Sequence
  source: /note="Description of Artificial Sequence: Synthetic peptide"
DRITIFGVVMGGGMDV

SEQ ID NO: 1493 - protein, 16 aa, Artificial Sequence
  source: /note="Description of Artificial Sequence: Synthetic peptide"
DRITIFGVVMGGGMDV

SEQ ID NO: 1494 - protein, 16 aa, Artificial Sequence
  source: /note="Description of Artificial Sequence: Synthetic peptide"
DRITIFGVVMGGGMDV

SEQ ID NO: 1495 - protein, 16 aa, Artificial Sequence
  source: /note="Description of Artificial Sequence: Synthetic peptide"
DRITIFGVVMGGGMDV

SEQ ID NO: 1496 - protein, 16 aa, Artificial Sequence
  source: /note="Description of Artificial Sequence: Synthetic peptide"
DRITIFGVVMGGGMDV

SEQ ID NO: 1497 - protein, 16 aa, Artificial Sequence
  source: /note="Description of Artificial Sequence: Synthetic peptide"
DRITIFGVVMGGGMDV

SEQ ID NO: 1498 - protein, 16 aa, Artificial Sequence
  source: /note="Description of Artificial Sequence: Synthetic peptide"
DRITIFGVVMGGGMDV

SEQ ID NO: 1499 - protein, 14 aa, Artificial Sequence
  source: /note="Description of Artificial Sequence: Synthetic peptide"
EATIFGMVIVPFDY

SEQ ID NO: 1500 - protein, 14 aa, Artificial Sequence
  source: /note="Description of Artificial Sequence: Synthetic peptide"
EATIFGMVIVPFDY

SEQ ID NO: 1501 - protein, 14 aa, Artificial Sequence
  source: /note="Description of Artificial Sequence: Synthetic peptide"
EATIFGMVIVPFDY

SEQ ID NO: 1502 - protein, 14 aa, Artificial Sequence
  source: /note="Description of Artificial Sequence: Synthetic peptide"
EATIFGMVIVPFDY

SEQ ID NO: 1503 - protein, 14 aa, Artificial Sequence
  source: /note="Description of Artificial Sequence: Synthetic peptide"
EATIFGMVIVPFDY

SEQ ID NO: 1504 - protein, 14 aa, Artificial Sequence
  source: /note="Description of Artificial Sequence: Synthetic peptide"
EATIFGMVIVPFDY

SEQ ID NO: 1505 - protein, 14 aa, Artificial Sequence
  source: /note="Description of Artificial Sequence: Synthetic peptide"
EATIFGMVIVPFDY

SEQ ID NO: 1506 - protein, 14 aa, Artificial Sequence
  source: /note="Description of Artificial Sequence: Synthetic peptide"
EATIFGMVIVPFDY

SEQ ID NO: 1507 - protein, 14 aa, Artificial Sequence
  source: /note="Description of Artificial Sequence: Synthetic peptide"
EATIFGMVIVPFDY

SEQ ID NO: 1508 - protein, 14 aa, Artificial Sequence
  source: /note="Description of Artificial Sequence: Synthetic peptide"
EATIFGMVIVPFDY

SEQ ID NO: 1509 - protein, 14 aa, Artificial Sequence
  source: /note="Description of Artificial Sequence: Synthetic peptide"
EATIFGMVIVPFDY

SEQ ID NO: 1510 - protein, 14 aa, Artificial Sequence
  source: /note="Description of Artificial Sequence: Synthetic peptide"
EATIFGMLIVPFDY

SEQ ID NO: 1511 - protein, 14 aa, Artificial Sequence
  source: /note="Description of Artificial Sequence: Synthetic peptide"
EATIFGMLIVPFDY

SEQ ID NO: 1512 - protein, 14 aa, Artificial Sequence
  source: /note="Description of Artificial Sequence: Synthetic peptide"
EATIFGMLIVPFDY

SEQ ID NO: 1513 - protein, 14 aa, Artificial Sequence
  source: /note="Description of Artificial Sequence: Synthetic peptide"
EATIFGMLIVPFDY

SEQ ID NO: 1514 - protein, 14 aa, Artificial Sequence
  source: /note="Description of Artificial Sequence: Synthetic peptide"
EATIFGMLIVPFDY

SEQ ID NO: 1515 - protein, 14 aa, Artificial Sequence
  source: /note="Description of Artificial Sequence: Synthetic peptide"
EATIFGMLIVPFDY

SEQ ID NO: 1516 - protein, 14 aa, Artificial Sequence
  source: /note="Description of Artificial Sequence: Synthetic peptide"
EATIFGMLIVPFDY

SEQ ID NO: 1517 - protein, 14 aa, Artificial Sequence
  source: /note="Description of Artificial Sequence: Synthetic peptide"
EATIFGMLIVPFDY

SEQ ID NO: 1518 - protein, 14 aa, Artificial Sequence
  source: /note="Description of Artificial Sequence: Synthetic peptide"
EATIFGMLIVPFDY

SEQ ID NO: 1519 - protein, 14 aa, Artificial Sequence
  source: /note="Description of Artificial Sequence: Synthetic peptide"
EATIFGMVIVPFDY

SEQ ID NO: 1520 - protein, 14 aa, Artificial Sequence
  source: /note="Description of Artificial Sequence: Synthetic peptide"
EATIFGMVIVPFDY

SEQ ID NO: 1521 - protein, 14 aa, Artificial Sequence
  source: /note="Description of Artificial Sequence: Synthetic peptide"
EATIFGMVIVPFDY

SEQ ID NO: 1522 - protein, 14 aa, Artificial Sequence
  source: /note="Description of Artificial Sequence: Synthetic peptide"
EATIFGMVIVPFDY

SEQ ID NO: 1523 - protein, 14 aa, Artificial Sequence
  source: /note="Description of Artificial Sequence: Synthetic peptide"
EATIFGMVIVPFDY

SEQ ID NO: 1524 - protein, 14 aa, Artificial Sequence
  source: /note="Description of Artificial Sequence: Synthetic peptide"
EATIFGMLIVPFDY

SEQ ID NO: 1525 - protein, 14 aa, Artificial Sequence
  source: /note="Description of Artificial Sequence: Synthetic peptide"
EATIFGMLIVPFDY

SEQ ID NO: 1526 - protein, 14 aa, Artificial Sequence
  source: /note="Description of Artificial Sequence: Synthetic peptide"
EATIFGMLIVPFDY

SEQ ID NO: 1527 - protein, 14 aa, Artificial Sequence
  source: /note="Description of Artificial Sequence: Synthetic peptide"
EATIFGMLIVPFDY

SEQ ID NO: 1528 - protein, 14 aa, Artificial Sequence
  source: /note="Description of Artificial Sequence: Synthetic peptide"
EATIFGMLIVPFDY

SEQ ID NO: 1529 - protein, 14 aa, Artificial Sequence
  source: /note="Description of Artificial Sequence: Synthetic peptide"
EATIFGMLIVPFDY

SEQ ID NO: 1530 - protein, 14 aa, Artificial Sequence
  source: /note="Description of Artificial Sequence: Synthetic peptide"
EATIFGMLIVPFDY

SEQ ID NO: 1531 - protein, 14 aa, Artificial Sequence
  source: /note="Description of Artificial Sequence: Synthetic peptide"
EATIFGMLIVPFDY

SEQ ID NO: 1532 - protein, 14 aa, Artificial Sequence
  source: /note="Description of Artificial Sequence: Synthetic peptide"
EATIFGMLIVPFDY

SEQ ID NO: 1533 - protein, 14 aa, Artificial Sequence
  source: /note="Description of Artificial Sequence: Synthetic peptide"
EATIFGMLIVPFDY

SEQ ID NO: 1534 - protein, 14 aa, Artificial Sequence
  source: /note="Description of Artificial Sequence: Synthetic peptide"
EATIFGMLIVPFDY

SEQ ID NO: 1535 - protein, 14 aa, Artificial Sequence
  source: /note="Description of Artificial Sequence: Synthetic peptide"
EATIFGMLIVPFDY

SEQ ID NO: 1536 - protein, 14 aa, Artificial Sequence
  source: /note="Description of Artificial Sequence: Synthetic peptide"
EATIFGMLIVPFDY

SEQ ID NO: 1537 - protein, 19 aa, Artificial Sequence
  source: /note="Description of Artificial Sequence: Synthetic peptide"
GGDYVWGTYRPHYYYGMDV

SEQ ID NO: 1538 - protein, 19 aa, Artificial Sequence
  source: /note="Description of Artificial Sequence: Synthetic peptide"
GGDYVWGTYRPHYYYGMDV

SEQ ID NO: 1539 - protein, 19 aa, Artificial Sequence
  source: /note="Description of Artificial Sequence: Synthetic peptide"
GGDYVWGTYRPHYYYGMDV

SEQ ID NO: 1540 - protein, 19 aa, Artificial Sequence
  source: /note="Description of Artificial Sequence: Synthetic peptide"
GGDYVWGTYRPHYYYGMDV

SEQ ID NO: 1541 - protein, 19 aa, Artificial Sequence
  source: /note="Description of Artificial Sequence: Synthetic peptide"
GGDYVWGTYRPHYYYGMDV

SEQ ID NO: 1542 - protein, 19 aa, Artificial Sequence
  source: /note="Description of Artificial Sequence: Synthetic peptide"
GGDYVWGTYRPHYYYGMDV

SEQ ID NO: 1543 - protein, 19 aa, Artificial Sequence
  source: /note="Description of Artificial Sequence: Synthetic peptide"
GGDYVWGTYRPHYYYGMDV

SEQ ID NO: 1544 - protein, 19 aa, Artificial Sequence
  source: /note="Description of Artificial Sequence: Synthetic peptide"
GGDYVWGTYRPHYYYGMDV

SEQ ID NO: 1545 - protein, 19 aa, Artificial Sequence
  source: /note="Description of Artificial Sequence: Synthetic peptide"
GGDYVWGTYRPHYYYGMDV

SEQ ID NO: 1546 - protein, 19 aa, Artificial Sequence
  source: /note="Description of Artificial Sequence: Synthetic peptide"
GGDYVWGTYRPHYYYGMDV

SEQ ID NO: 1547 - protein, 19 aa, Artificial Sequence
  source: /note="Description of Artificial Sequence: Synthetic peptide"
GGDYVWGTYRPHYYYGMDV

SEQ ID NO: 1548 - protein, 19 aa, Artificial Sequence
  source: /note="Description of Artificial Sequence: Synthetic peptide"
GGDYVWGTYRPHYYYGMDV

SEQ ID NO: 1549 - protein, 19 aa, Artificial Sequence
  source: /note="Description of Artificial Sequence: Synthetic peptide"
GGDYVFGTYRPHYYYGMDV

SEQ ID NO: 1550 - protein, 19 aa, Artificial Sequence
  source: /note="Description of Artificial Sequence: Synthetic peptide"
GGDYVFGTYRPHYYYGMDV

SEQ ID NO: 1551 - protein, 12 aa, Artificial Sequence
  source: /note="Description of Artificial Sequence: Synthetic peptide"
DRTIFGVVLGDY

SEQ ID NO: 1552 - protein, 12 aa, Artificial Sequence
  source: /note="Description of Artificial Sequence: Synthetic peptide"
DRTIFGVLLGDY

SEQ ID NO: 1553 - protein, 19 aa, Artificial Sequence
  source: /note="Description of Artificial Sequence: Synthetic peptide"
GGDYVWGTYRPHYYYGMDV

SEQ ID NO: 1554 - protein, 12 aa, Artificial Sequence
  source: /note="Description of Artificial Sequence: Synthetic peptide"
GKVAGMPEAFEI

SEQ ID NO: 1555 - protein, 20 aa, Artificial Sequence
  source: /note="Description of Artificial Sequence: Synthetic peptide"
GGDYVWGSYRPYYYYYGMDV

SEQ ID NO: 1556 - protein, 12 aa, Artificial Sequence
  source: /note="Description of Artificial Sequence: Synthetic peptide"
GKVAGMPEAFEI

SEQ ID NO: 1557 - protein, 12 aa, Artificial Sequence
  source: /note="Description of Artificial Sequence: Synthetic peptide"
GKVAGMPEAFEI

SEQ ID NO: 1558 - protein, 12 aa, Artificial Sequence
  source: /note="Description of Artificial Sequence: Synthetic peptide"
GKVAGMPEAFEI

SEQ ID NO: 1559 - protein, 12 aa, Artificial Sequence
  source: /note="Description of Artificial Sequence: Synthetic peptide"
GKVAGMPEAFEI

SEQ ID NO: 1560 - protein, 12 aa, Artificial Sequence
  source: /note="Description of Artificial Sequence: Synthetic peptide"
GKVAGMPEAFEI

SEQ ID NO: 1561 - protein, 12 aa, Artificial Sequence
  source: /note="Description of Artificial Sequence: Synthetic peptide"
GKVAGMPEAFEI

SEQ ID NO: 1562 - protein, 20 aa, Artificial Sequence
  source: /note="Description of Artificial Sequence: Synthetic peptide"
GGDYVWGSYRPYYYYYGMDV

SEQ ID NO: 1563 - protein, 20 aa, Artificial Sequence
  source: /note="Description of Artificial Sequence: Synthetic peptide"
GGDYVWGSYRPYYYYYGMDV

SEQ ID NO: 1564 - protein, 20 aa, Artificial Sequence
  source: /note="Description of Artificial Sequence: Synthetic peptide"
GGDYVWGSYRPYYYYYGMDV

SEQ ID NO: 1565 - protein, 20 aa, Artificial Sequence
  source: /note="Description of Artificial Sequence: Synthetic peptide"
GGDYVWGSYRPYYYYYGMDV

SEQ ID NO: 1566 - protein, 20 aa, Artificial Sequence
  source: /note="Description of Artificial Sequence: Synthetic peptide"
GGDYVWGSYRPYYYYYGMDV

SEQ ID NO: 1567 - protein, 20 aa, Artificial Sequence
  source: /note="Description of Artificial Sequence: Synthetic peptide"
GGDYVWGSYRPYYYYYGMDV

SEQ ID NO: 1568 - protein, 20 aa, Artificial Sequence
  source: /note="Description of Artificial Sequence: Synthetic peptide"
GGDYVFGSYRPYYYYYGMDV

SEQ ID NO: 1569 - protein, 20 aa, Artificial Sequence
  source: /note="Description of Artificial Sequence: Synthetic peptide"
GGDYVFGSYRPYYYYYGMDV

SEQ ID NO: 1570 - protein, 12 aa, Artificial Sequence
  source: /note="Description of Artificial Sequence: Synthetic peptide"
GKVAGMPEAFEI

SEQ ID NO: 1571 - DNA, 333 bp, Artificial Sequence
  source: /note="Description of Artificial Sequence: Synthetic polynucleotide"
cagtctgtgctgactcagccaccctcagcgtctgggacccccgggcagagggtcaccatctcttgttctggaagtagctccaacatcggaagtaatactgtaaactggtaccagcacctcccaggaacggcccccaaactcctcatctatactaataatcagcggccctcaggggtccctgaccgattctctggctccaagtctggcacctcagcctcccttgccatcagtgggctccagtctgaggatgaggctgattatttctgtgcaacattcgatgacagcctgaatggtccggtattcggcggagggaccaagctgaccgtcctaggt

SEQ ID NO: 1572 - DNA, 324 bp, Artificial Sequence
  source: /note="Description of Artificial Sequence: Synthetic polynucleotide"
gacatccagatgacccagtctccatcctccctgtctgcatctataggagacagagtcaccatcacttgccgggcaagtcaggacattagagattatttaggctggtatcagcagaaaccagggaaagcccctaagcgcctgatctatggtgcatccagtttgcaaagtggggtcccttcaaggttcagcggcagtggatctgggacagaattcactctcacaatcagcagcctgcagcctgaagatttcgcaacttattactgtctacagcataataattaccccttcactttcggccctgggaccaaagtggatatcaaacga

SEQ ID NO: 1573 - DNA, 324 bp, Artificial Sequence; identical to SEQ ID NO: 1572
  source: /note="Description of Artificial Sequence: Synthetic polynucleotide"

SEQ ID NO: 1574 - DNA, 321 bp, Artificial Sequence
  source: /note="Description of Artificial Sequence: Synthetic polynucleotide"
gacatccagatgacccagtctccatcctccctgtctgcatctgtaggagacagagtcaccatcacttgccaggcgagtcaggacattagcaactatttaaattggtatcagcagaaaccagggaaagcccctaagctcctgatctacgatgcatccaatttggaaacaggggtcccatcaaggttcagtggaagtggatctgggacagattttagtttcaccatcagcagcctgcagcctgaagatattgcaacatattactgtcaacagtatgatattctcctcactttcggcggagggaccaaggtggagatcaagcga

SEQ ID NO: 1575 - DNA, 342 bp, Artificial Sequence
  source: /note="Description of Artificial Sequence: Synthetic polynucleotide"
gacatcgtgatgacccagtctccagactccctggctgtgtctctgggcgagagggccaccatcaactgcaagtccagccagagtgttttatccagctccaacaataagaactacatagcttggtaccagcagcaaccaggacatcctcctaagctgctcatttactgggcatctacccgggaatccggggtccctgaccgattcagtggcagcgggtctgggacagatttcactctcaccatcagcagcctgcaggctgaagatgtggcagttttttactgtcaacaatattatagtactccgtggacgttcggccaagggaccaaggtggaaatcaaacga

SEQ ID NO: 1576 - DNA, 342 bp, Artificial Sequence
  source: /note="Description of Artificial Sequence: Synthetic polynucleotide"
gacatcgtgatgacccagtctccagactccctggctgtgtctctgggcgagagggccaccatcaactgcaagtccagccagagtgttttatccagctccaacaataagaactacatagcttggtaccagcagaaaccaggacatcctcctaagctgctcatttactgggcatctacccgggaatccggggtccctgaccgattcagtggcagcgggtctgggacagatttcactctcaccatcagcagcctgcaggctgaagatgtggcagttttttactgtcaacaatattatagtactccgtggacgttcggccaagggaccaaggtggaaatcaaacga

SEQ ID NO: 1577 - DNA, 342 bp, Artificial Sequence
  source: /note="Description of Artificial Sequence: Synthetic polynucleotide"
gacatcgtgatgacccagtctccagactccctgtctgtgtctctgggcgagagggccaccatcaactgcaagtccagccagagtgttttatccagctccaacaataagaactacttagcttggtaccaacagaaaccaggacagcctcctaacctgctcatttactggacttctacccgagattccggggtccctgaccgattcagtggcagcgggtctgggacagatttcactctcaccatcaacagcctgcaggctgaagatgtggctgtttattactgtcagcaatattatcgtactccgtggacgttcggccaagggaccaaggtggaaatcaaacga

SEQ ID NO: 1578 - DNA, 342 bp, Artificial Sequence
  source: /note="Description of Artificial Sequence: Synthetic polynucleotide"
gacatcgtgatgacccagtctccagactccctgtctgtgtctctgggcgagagggccaccatcaactgcaagtccagccagagtgttttatccagctccaacaataagaactacttagcttggtaccagcagaaaccaggacagcctcctaacctgctcatttactggacttctacccgagattccggggtccctgaccgattcagtggcagcgggtctgggacagatttcactctcaccatcaacagcctgcaggctgaagatgtggctgtttattactgtcagcaatattatcgtactccgtggacgttcggccaagggaccaaggtggaaatcaaacga

SEQ ID NO: 1579 - DNA, 327 bp, Artificial Sequence
  source: /note="Description of Artificial Sequence: Synthetic polynucleotide"
gaaattgtgttgacgcagtctccaggcaccctgtctttgtctccaggggaaagagccaccctctcctgcagggccagtcagagtattagttacagttacttagcctggtaccagcagaaacctggccaggctccccggctcctcatctatggtgcatccagcagggccactggcatcccagacaggttcagtggcagtgggtctgggacagacttcactctcaccatcagcagacaggagcctgatgattttgcagtgtattactgtcagcagtatggtagttcaccgctcactttcggcggagggaccaaggtggagatcaaacga

SEQ ID NO: 1580 - DNA, 324 bp, Artificial Sequence
  source: /note="Description of Artificial Sequence: Synthetic polynucleotide"
gaaatagtgatgacgcagtctccagccaccctgtctgtgtctccaggggaaagagccaccctctcctgcagggccagtcagagtgttagcagcaacttagcctggtaccagcagaaacctggccaggctcccaggctcctcatctatggtgcagccaccagggccactggtatcccagccagggtcagtggcagtgggtctgggacagagttcactctcaccatcagcagcctgcagtctgaagattttgcagtttattactgtcagcagtataataactggcctctcactttcggcggagggaccaaggtggagatcaaacga

SEQ ID NO: 1581 - DNA, 324 bp, Artificial Sequence
  source: /note="Description of Artificial Sequence: Synthetic polynucleotide"
gacattcagatgacccagtctccatcctccctgtctgcatctgtaggagacagagtcaccatcacttgccgggcaagtcagggcattagaaatgagttaggctggtatcagcagaaaccagggaaagcccctaaacgcctgatctatggtgcatccagtttgcaaagtggggtcccatcaaggttcagcggcagtggatctgggacagagttcactctcacaatcagcagcctgcagcctgaagattttgtaacttattactgtctacagcataatagttacccattcactttcggccctgggaccaaagtggatgtcaaacga

SEQ ID NO: 1582 - DNA, 321 bp, Artificial Sequence
  source: /note="Description of Artificial Sequence: Synthetic polynucleotide"
gacatccagatgacccagtctccatcctccctgtctgcatctgtgggggacagagtcaccatcacttgccaggcgagtcaggacattaccaactatttaaattggtatcagcagaaaccagggaaagcccctaaactcctgatctacgatgcttccaatttggagccaggggtcccatcaaggttcagtggaagtggatctgggacagattttactttcaccatcagcagcctgcagcctgaagatattgcaacatattactgtcaacagtatgatgatctattcactttcggccctgggaccaaagtggatatcaaacga

SEQ ID NO: 1583 - DNA, 324 bp, Artificial Sequence
  source: /note="Description of Artificial Sequence: Synthetic polynucleotide"
gacatccagatgacccagtctccatcttccgtgtctgcatctgtaggagacagagtcaccatcacttgtcgggcgagtcagggtcttatcatctggttagcctggtatcagcagaaaccggggaaagcccctaaactcctgatctatgctgcatccagtttgcaaagtggggtcccatcaaggttcagcggcagtggctctgggacagatttcactctcaccatcagcagcctacagcctgaagattttgcaacttactattgtcaacagactaacagtttccctccgacgttcggccaagggaccaaggtggaaatcaaacga

SEQ ID NO: 1584 - DNA, 324 bp, Artificial Sequence; identical to SEQ ID NO: 1583
  source: /note="Description of Artificial Sequence: Synthetic polynucleotide"

SEQ ID NO: 1585 - DNA, 324 bp, Artificial Sequence
  source: /note="Description of Artificial Sequence: Synthetic polynucleotide"
gacattcagatgacccagtctccatcctccctgtctgcatctgtaggagacagagtcaccatcacttgccgggcaagtcagggcattagaaatgagttaggctggtatcagcagaaaccagggaaagcccctaaactcctgatctatggtgcatccagtttgcaaagtggggtcccatcaaggttcagcggcagtggatctgggacagagttcactctcacaatcagcagcctgcagcctgaagattttgtaacttattactgtctacagcataatagttacccattcactttcggccaagggaccaaagtggatgtcaaacga

SEQ ID NO: 1586 - DNA, 324 bp, Artificial Sequence; identical to SEQ ID NO: 1585
  source: /note="Description of Artificial Sequence: Synthetic polynucleotide"

SEQ ID NO: 1587 - DNA, 324 bp, Artificial Sequence; identical to SEQ ID NO: 1585
  source: /note="Description of Artificial Sequence: Synthetic polynucleotide"

SEQ ID NO: 1588 - DNA, 324 bp, Artificial Sequence
  source: /note="Description of Artificial Sequence: Synthetic polynucleotide"
gacattcagatgacccagtctccatcctccctgtctgcatctgtaggagacagagtcaccatcacttgccgggcaagtcagggcattagaaatgagttaggctggtatcagcagaaaccagggaaagcccctaaactcctgatctatggtgcatccagtttgcaaagtggggtcccatcaaggttcagcggcagtggatctgggacagagttcactctcacaatcagcagcctgcagcctgaagattttgtaacttattactgtctacagcataatagttacccattcactttcggccctgggaccaaagtggatgtcaaacga

SEQ ID NO: 1589 - DNA, 324 bp, Artificial Sequence
  source: /note="Description of Artificial Sequence: Synthetic polynucleotide"
gacattcagatgacccagtctccatcctccctgtctgcatctgtaggagacagagtcaccatcacttgccgggcaagtcagggcattagaaatgagttaggctggtatcagcagaaaccagggaaagcccctaaacgcctgatctatggtgcatccagtttgcaaagtggggtcccatcaaggttcagcggcagtggatctgggacagagttcactctcacaatcagcagcctgcagcctgaagattttgtaacttattactgtctacagcataatagttacccattcactttcggccaagggaccaaagtggatgtcaaacga

SEQ ID NO: 1590 - DNA, 324 bp, Artificial Sequence; identical to SEQ ID NO: 1585
  source: /note="Description of Artificial Sequence: Synthetic polynucleotide"

SEQ ID NO: 1591 - DNA, 324 bp, Artificial Sequence
  source: /note="Description of Artificial Sequence: Synthetic polynucleotide"
gacatccagatgacccagtctccatcctccctgtctgcatctataggagacagagtcaccatcacttgccgggcaagtcaggacattagagattatttaggctggtatcagcagaaaccagggaaagcccctaagctcctgatctatggtgcatccagtttgcaaagtggggtcccttcaaggttcagcggcagtggatctgggacagaattcactctcacaatcagcagcctgcagcctgaagatttcgcaacttattactgtctacagcataataattaccccttcactttcggccaagggaccaaagtggatatcaaacga

SEQ ID NO: 1592 - DNA, 324 bp, Artificial Sequence
  source: /note="Description of Artificial Sequence: Synthetic polynucleotide"
gacatccagatgacccagtctccatcctccctgtctgcatctataggagacagagtcaccatcacttgccgggcaagtcaggacattagagattatttaggctggtatcagcagaaaccagggaaagcccctaagcgcctgatctatggtgcatccagtttgcaaagtggggtcccttcaaggttcagcggcagtggatctgggacagaattcactctcacaatcagcagcctgcagcctgaagatttcgcaacttattactgtctacagcataataattaccccttcactttcggccaagggaccaaagtggatatcaaacga

SEQ ID NO: 1593 - DNA, 324 bp, Artificial Sequence
  source: /note="Description of Artificial Sequence: Synthetic polynucleotide"
gacatccagatgacccagtctccatcctccctgtctgcatctataggagacagagtcaccatcacttgccgggcaagtcaggacattagagattatttaggctggtatcagcagaaaccagggaaagcccctaagctcctgatctatggtgcatccagtttgcaaagtggggtcccttcaaggttcagcggcagtggatctgggacagaattcactctcacaatcagcagcctgcagcctgaagatttcgcaacttattactgtctacagcataataattaccccttcactttcggccctgggaccaaagtggatatcaaacga

SEQ ID NO: 1594 - DNA, 324 bp, Artificial Sequence; identical to SEQ ID NO: 1591
  source: /note="Description of Artificial Sequence: Synthetic polynucleotide"

SEQ ID NO: 1595 - DNA, 324 bp, Artificial Sequence; identical to SEQ ID NO: 1591
  source: /note="Description of Artificial Sequence: Synthetic polynucleotide"

SEQ ID NO: 1596 - DNA, 324 bp, Artificial Sequence; identical to SEQ ID NO: 1591
  source: /note="Description of Artificial Sequence: Synthetic polynucleotide"

SEQ ID NO: 1597 - DNA, 324 bp, Artificial Sequence; identical to SEQ ID NO: 1591
  source: /note="Description of Artificial Sequence: Synthetic polynucleotide"

SEQ ID NO: 1598 - DNA, 324 bp, Artificial Sequence
  source: /note="Description of Artificial Sequence: Synthetic polynucleotide"
gacatccagatgacccagtctccatcctccctgtctgcatctataggagacagagtcaccatcacttgccgggcaagtcaggaccttagaaattatttaggctggtatcaccagaaaccagggaaagcccctaagcgcctgatctatggtgcatccagtttgcaaagtggggtcccttcaaggttcagcggcagtggatctgggacagaattcactctcacaatcagcagcctgcagcctgaagatttcgcaacttattactgtctacagcataataattaccccttcactttcggccctgggaccaaagtggatatcaaacga

SEQ ID NO: 1599 - DNA, 324 bp, Artificial Sequence
  source: /note="Description of Artificial Sequence: Synthetic polynucleotide"
gacatccagatgacccagtctccatcctccctgtctgcatctataggagacagagtcaccatcacttgccgggcaagtcaggaccttagaaattatttaggctggtatcaacagaaaccagggaaagcccctaagctcctgatctatggtgcatccagtttgcaaagtggggtcccttcaaggttcagcggcagtggatctgggacagaattcactctcacaatcagcagcctgcagcctgaagatttcgcaacttattactgtctacagcataataattaccccttcactttcggccctgggaccaaagtggatatcaaacga

SEQ ID NO: 1600 - DNA, 324 bp, Artificial Sequence; identical to SEQ ID NO: 1599
  source: /note="Description of Artificial Sequence: Synthetic polynucleotide"

SEQ ID NO: 1601 - DNA, 324 bp, Artificial Sequence
  source: /note="Description of Artificial Sequence: Synthetic polynucleotide"
gacatccagatgacccagtctccatcctccctgtctgcatctataggagacagagtcaccatcacttgccgggcaagtcaggaccttagaaattatttaggctggtatcaccagaaaccagggaaagcccctaagctcctgatctatggtgcatccagtttgcaaagtggggtcccttcaaggttcagcggcagtggatctgggacagaattcactctcacaatcagcagcctgcagcctgaagatttcgcaacttattactgtctacagcataataattaccccttcactttcggccctgggaccaaagtggatatcaaacga

SEQ ID NO: 1602 - DNA, 324 bp, Artificial Sequence
  source: /note="Description of Artificial Sequence: Synthetic polynucleotide"
gacatccagatgacccagtctccatcctccctgtctgcatctataggagacagagtcaccatcacttgccgggcaagtcaggaccttagaaattatttaggctggtatcaacagaaaccagggaaagcccctaagcgcctgatctatggtgcatccagtttgcaaagtggggtcccttcaaggttcagcggcagtggatctgggacagaattcactctcacaatcagcagcctgcagcctgaagatttcgcaacttattactgtctacagcataataattaccccttcactttcggccctgggaccaaagtggatatcaaacga

SEQ ID NO: 1603 - DNA, 324 bp, Artificial Sequence; identical to SEQ ID NO: 1602
  source: /note="Description of Artificial Sequence: Synthetic polynucleotide"

SEQ ID NO: 1604 - DNA, 324 bp, Artificial Sequence; identical to SEQ ID NO: 1601
  source: /note="Description of Artificial Sequence: Synthetic polynucleotide"

SEQ ID NO: 1605 - DNA, 324 bp, Artificial Sequence; identical to SEQ ID NO: 1598
  source: /note="Description of Artificial Sequence: Synthetic polynucleotide"

SEQ ID NO: 1606 - DNA, 324 bp, Artificial Sequence; identical to SEQ ID NO: 1599
  source: /note="Description of Artificial Sequence: Synthetic polynucleotide"

SEQ ID NO: 1607 - DNA, 324 bp, Artificial Sequence; identical to SEQ ID NO: 1599
  source: /note="Description of Artificial Sequence: Synthetic polynucleotide"

SEQ ID NO: 1608 - DNA, 324 bp, Artificial Sequence
  source: /note="Description of Artificial Sequence: Synthetic polynucleotide"
gacatccagatgacccagtctccatcctccctgtctgcatctataggagacagagtcaccatcacttgccgggcaagtcaggaccttagaaattatttaggctggtatcaacagaaaccagggaaagcccctaagctcctgatctatggtgcatccagtttgcaaagtggggtcccttcaaggttcagcggcagtggatctgggacagaattcactctcacaatcagcagcctgcagcctgaagatttcgcaacttattactgtctacagcataataattaccccttcactttcggccaagggaccaaagtggatatcaaacga

SEQ ID NO: 1609 - DNA, 324 bp, Artificial Sequence; identical to SEQ ID NO: 1599
  source: /note="Description of Artificial Sequence: Synthetic polynucleotide"

SEQ ID NO: 1610 - DNA, 321 bp, Artificial Sequence
  source: /note="Description of Artificial Sequence: Synthetic polynucleotide"
gacatccagatgacccagtctccatcctccctgtctgcatctgtaggagacagagtcaccatcacttgccaggcgagtcaggacattagcaactatttaaattggtatcagcagaaaccagggaaagcccctaagctcctgatctacgatgcatccaatttggaaacaggggtcccatcaaggttcagtggaagtggatctgggacagattttagtctcaccatcagcagcctgcagcctgaagattttgcaacatattactgtcaacagtatgatattctcctcactttcggcggagggaccaaggtggagatcaagcga

SEQ ID NO: 1611 - DNA, 321 bp, Artificial Sequence; identical to SEQ ID NO: 1610
  source: /note="Description of Artificial Sequence: Synthetic polynucleotide"

SEQ ID NO: 1612 - DNA, 321 bp, Artificial Sequence
  source: /note="Description of Artificial Sequence: Synthetic polynucleotide"
gacatccagatgacccagtctccatcctccctgtctgcatctgtaggagacagagtcaccatcacttgccaggcgagtcaggacattagcaactatttaaattggtatcagcagaaaccagggaaagcccctaagctcctgatctacgatgcatccaatttggaaacaggggtcccatcaaggttcagtggaagtggatctgggacagattttagtctcaccatcagcagcctgcagcctgaagatattgcaacatattactgtcaacagtatgatattctcctcactttcggcggagggaccaaggtggagatcaagcga

SEQ ID NO: 1613 - DNA, 321 bp, Artificial Sequence
  source: /note="Description of Artificial Sequence: Synthetic polynucleotide"
gacatccagatgacccagtctccatcctccctgtctgcatctgtaggagacagagtcaccatcacttgccaggcgagtcaggacattagcaactatttaaattggtatcagcagaaaccagggaaagcccctaagctcctgatctacgatgcatccaatttggaaacaggggtcccatcaaggttcagtggaagtggatctgggacagattttagtttcaccatcagcagcctgcagcctgaagattttgcaacatattactgtcaacagtatgatattctcctcactttcggcggagggaccaaggtggagatcaagcga

SEQ ID NO: 1614 - DNA, 321 bp, Artificial Sequence; identical to SEQ ID NO: 1612
  source: /note="Description of Artificial Sequence: Synthetic polynucleotide"

SEQ ID NO: 1615 - DNA, 321 bp, Artificial Sequence; identical to SEQ ID NO: 1613
  source: /note="Description of Artificial Sequence: Synthetic polynucleotide"

SEQ ID NO: 1616 - DNA, 321 bp, Artificial Sequence; identical to SEQ ID NO: 1574
  source: /note="Description of Artificial Sequence: Synthetic polynucleotide"

SEQ ID NO: 1617 - DNA, 321 bp, Artificial Sequence; identical to SEQ ID NO: 1610
  source: /note="Description of Artificial Sequence: Synthetic polynucleotide"

SEQ ID NO: 1618 - DNA, 321 bp, Artificial Sequence; identical to SEQ ID NO: 1610
  source: /note="Description of Artificial Sequence: Synthetic polynucleotide"

SEQ ID NO: 1619 - DNA, 324 bp, Artificial Sequence; identical to SEQ ID NO: 1572
  source: /note="Description of Artificial Sequence: Synthetic polynucleotide"

SEQ ID NO: 1620 - DNA, 324 bp, Artificial Sequence; identical to SEQ ID NO: 1572
  source: /note="Description of Artificial Sequence: Synthetic polynucleotide"

SEQ ID NO: 1621 - DNA, 324 bp, Artificial Sequence; identical to SEQ ID NO: 1591
  source: /note="Description of Artificial Sequence: Synthetic polynucleotide"

SEQ ID NO: 1622 - DNA, 324 bp, Artificial Sequence; identical to SEQ ID NO: 1591
  source: /note="Description of Artificial Sequence: Synthetic polynucleotide"

SEQ ID NO: 1623 - DNA, 324 bp, Artificial Sequence; identical to SEQ ID NO: 1593
  source: /note="Description of Artificial Sequence: Synthetic polynucleotide"

SEQ ID NO: 1624 - DNA, 324 bp, Artificial Sequence; identical to SEQ ID NO: 1593
  source: /note="Description of Artificial Sequence: Synthetic polynucleotide"

SEQ ID NO: 1625 - DNA, 324 bp, Artificial Sequence; identical to SEQ ID NO: 1593
  source: /note="Description of Artificial Sequence: Synthetic polynucleotide"

SEQ ID NO: 1626 - DNA, 321 bp, Artificial Sequence
  source: /note="Description of Artificial Sequence: Synthetic polynucleotide"
gacatccagatgacccagtctccatcctccctgtctgcatctgtgggggacagagtcaccatcacttgccaggcgagtcaggacattaccaactatttaaattggtatcagcagaaaccagggaaagcccctaaactcctgatctacgatgcttccaatttggagccaggggtcccatcaaggttcagtggaagtggatctgggacagattttactctcaccatcagcagcctgcagcctgaagattttgcaacatattactgtcaacagtatgatgatctattcactttcggccctgggaccaaagtggatatcaaacga

SEQ ID NO: 1627 - DNA, 321 bp, Artificial Sequence
  source: /note="Description of Artificial Sequence: Synthetic polynucleotide"
gacatccagatgacccagtctccatcctccctgtctgcatctgtgggggacagagtcaccatcacttgccaggcgagtcaggacattaccaactatttaaattggtatcagcagaaaccagggaaagcccctaaactcctgatctacgatgcttccaatttggagccaggggtcccatcaaggttcagtggaagtggatctgggacagattttactctcaccatcagcagcctgcagcctgaagatattgcaacatattactgtcaacagtatgatgatctattcactttcggccctgggaccaaagtggatatcaaacga

SEQ ID NO: 1628 - DNA, 321 bp, Artificial Sequence; identical to SEQ ID NO: 1626
  source: /note="Description of Artificial Sequence: Synthetic polynucleotide"

SEQ ID NO: 1629 - DNA, 321 bp, Artificial Sequence
  source: /note="Description of Artificial Sequence: Synthetic polynucleotide"
gacatccagatgacccagtctccatcctccctgtctgcatctgtgggggacagagtcaccatcacttgccaggcgagtcaggacattaccaactatttaaattggtatcagcagaaaccagggaaagcccctaaactcctgatctacgatgcttccaatttggagccaggggtcccatcaaggttcagtggaagtggatctgggacagattttactttcaccatcagcagcctgcagcctgaagattttgcaacatattactgtcaacagtatgatgatctattcactttcggccctgggaccaaagtggatatcaaacga

SEQ ID NO: 1630 - DNA, 321 bp, Artificial Sequence; identical to SEQ ID NO: 1627
  source: /note="Description of Artificial Sequence: Synthetic polynucleotide"

SEQ ID NO: 1631 - DNA, 321 bp, Artificial Sequence; identical to SEQ ID NO: 1629
  source: /note="Description of Artificial Sequence: Synthetic polynucleotide"

SEQ ID NO: 1632 - DNA, 321 bp, Artificial Sequence; identical to SEQ ID NO: 1582
  source: /note="Description of Artificial Sequence: Synthetic polynucleotide"

SEQ ID NO: 1633 - DNA, 321 bp, Artificial Sequence; identical to SEQ ID NO: 1626
  source: /note="Description of Artificial Sequence: Synthetic polynucleotide"

SEQ ID NO: 1634 - DNA, 321 bp, Artificial Sequence; identical to SEQ ID NO: 1626
  source: /note="Description of Artificial Sequence: Synthetic polynucleotide"

SEQ ID NO: 1635 - DNA, 321 bp, Artificial Sequence
  source: /note="Description of Artificial Sequence: Synthetic polynucleotide"
gacatccagatgacccagtctccatcctccctgtctgcatctgtgggggacagagtcaccatcacttgccaggcgagtcaggacattaccaactatttaaattggtatcagcagaaaccagggaaagcccctaaactcctgatctacgatgcttccaatttggagccaggggtcccatcaaggttcagtggaagtggatctgggacagattttactctcaccatcagcagcctgcagcctgaagattttgcaacatattactgtcaacagtatgatgatctattcactttcggccaagggaccaaagtggatatcaaacga

SEQ ID NO: 1636 - DNA, 321 bp, Artificial Sequence; identical to SEQ ID NO: 1635
  source: /note="Description of Artificial Sequence: Synthetic polynucleotide"

SEQ ID NO: 1637 - DNA, 324 bp, Artificial Sequence
  source: /note="Description of Artificial Sequence: Synthetic polynucleotide"
gaaattgtgttgacgcagtctccaggcaccctgtctttgtctccaggggaaagagccaccctctcctgcagggccagtcagatttttaccagcacctacttagcctggtaccagcagaaacctggccaggctcccaggctcctcatctatggtgcatccagcagggccactggcatcccagacaggttcagtggcagtgggtctgggacagacttcactctcaccatcagcagattggagcctgaagattttgcagtgtattactgtcagcagtatggtagctcacctcgcttcggccaagggacacgactggagattaaacga

SEQ ID NO: 1638 - DNA, 324 bp, Artificial Sequence; identical to SEQ ID NO: 1637
  source: /note="Description of Artificial Sequence: Synthetic polynucleotide"

SEQ ID NO: 1639 - DNA, 324 bp, Artificial Sequence; identical to SEQ ID NO: 1637
  source: /note="Description of Artificial Sequence: Synthetic polynucleotide"

SEQ ID NO: 1640 - DNA, 324 bp, Artificial Sequence; identical to SEQ ID NO: 1637
  source: /note="Description of Artificial Sequence: Synthetic polynucleotide"

SEQ ID NO: 1641 - DNA, 324 bp, Artificial Sequence
  source: /note="Description of Artificial Sequence: Synthetic polynucleotide"
gaaatagtgatgacgcagtctccagccaccctgtctgtgtctccaggggaaagagccaccctctcctgcagggccagtcagagtgttagcagcaacttagcctggtaccagcagaaacctggccaggctcccaggctcctcatctatggtgcagccaccagggccactggtatcccagccaggttcagtggcagtgggtctgggacagagttcactctcaccatcagcagcctgcagtctgaagattttgcagtttattactgtcagcagtataataactggcctctcactttcggcggagggaccaaggtggagatcaaacga

SEQ ID NO: 1642 - DNA, 324 bp, Artificial Sequence; identical to SEQ ID NO: 1641
  source: /note="Description of Artificial Sequence: Synthetic polynucleotide"

SEQ ID NO: 1643 - DNA, 324 bp, Artificial Sequence; identical to SEQ ID NO: 1641
  source: /note="Description of Artificial Sequence: Synthetic polynucleotide"

SEQ ID NO: 1644 - DNA, 324 bp, Artificial Sequence; identical to SEQ ID NO: 1580
  source: /note="Description of Artificial Sequence: Synthetic polynucleotide"

SEQ ID NO: 1645 - DNA, 324 bp, Artificial Sequence
  source: /note="Description of Artificial Sequence: Synthetic polynucleotide"
gaaatagtgatgacgcagtctccagccaccctgtctgtgtctccaggggaaagagccaccctctcctgcagggccagtcagagtgttagcagcaacttagcctggtaccagcagaaacctggccaggctcccaggctcctcatctatggtgcagccaccagggccactggtatcccagccaggttcagtggcagtgggtctgggacagagttcactctcaccatcagcagcctggagcctgaagattttgcagtttattactgtcagcagtataataacttccctctcactttcggcggagggaccaaggtggagatcaaacga

SEQ ID NO: 1646 - DNA, 324 bp, Artificial Sequence
  source: /note="Description of Artificial Sequence: Synthetic polynucleotide"
gaaatagtgatgacgcagtctccagccaccctgtctgtgtctccaggggaaagagccaccctctcctgcagggccagtcagagtgttagcagcaacttagcctggtaccagcagaaacctggccaggctcccaggctcctcatctatggtgcagccaccagggccactggtatcccagccaggttcagtggcagtgggtctgggacagagttcactctcaccatcagcagcctggagcctgaagattttgcagtttattactgtcagcagtataataactatcctctcactttcggcggagggaccaaggtggagatcaaacga

SEQ ID NO: 1647 - DNA, 324 bp, Artificial Sequence
  source: /note="Description of Artificial Sequence: Synthetic polynucleotide"
gaaatagtgatgacgcagtctccagccaccctgtctgtgtctccaggggaaagagccaccctctcctgcagggccagtcagagtgttagcagcaacttagcctggtaccagcagaaacctggccaggctcccaggctcctcatctatggtgcagccaccagggccactggtatcccagccaggttcagtggcagtgggtctgggacagagttcactctcaccatcagcagcctggagcctgaagattttgcagtttattactgtcagcagtataataactggcctctcactttcggcggagggaccaaggtggagatcaaacga

SEQ ID NO: 1648 - DNA, 324 bp, Artificial Sequence; identical to SEQ ID NO: 1647
  source: /note="Description of Artificial Sequence: Synthetic polynucleotide"

SEQ ID NO: 1649 - DNA, 327 bp, Artificial Sequence
  source: /note="Description of Artificial Sequence: Synthetic polynucleotide"
gaaattgtgttgacgcagtctccaggcaccctgtctttgtctccaggggaaagagccaccctctcctgcagggccagtcagagtattagttacagttacttagcctggtaccagcagaaacctggccaggctccccggctcctcatctatggtgcatccagcagggccactggcatcccagacaggttcagtggcagtgggtctgggacagacttcactctcaccatcagcagactggagcctgatgattttgcagtgtattactgtcagcagtatggtagttcaccgctcactttcggcggagggaccaaggtggagatcaaacga

SEQ ID NO: 1650 - DNA, 327 bp, Artificial Sequence; identical to SEQ ID NO: 1579
  source: /note="Description of Artificial Sequence: Synthetic polynucleotide"

SEQ ID NO: 1651 - DNA, 327 bp, Artificial Sequence; identical to SEQ ID NO: 1649
  source: /note="Description of Artificial Sequence: Synthetic polynucleotide"

SEQ ID NO: 1652 - DNA, 327 bp, Artificial Sequence; identical to SEQ ID NO: 1649
  source: /note="Description of Artificial Sequence: Synthetic polynucleotide"

SEQ ID NO: 1653 - DNA, 327 bp, Artificial Sequence; identical to SEQ ID NO: 1649
  source: /note="Description of Artificial Sequence: Synthetic polynucleotide"

SEQ ID NO: 1654 - DNA, 327 bp, Artificial Sequence; identical to SEQ ID NO: 1579
  source: /note="Description of Artificial Sequence: Synthetic polynucleotide"

SEQ ID NO: 1655 - DNA, 327 bp, Artificial Sequence; identical to SEQ ID NO: 1579
  source: /note="Description of Artificial Sequence: Synthetic polynucleotide"

SEQ ID NO: 1656 - DNA, 342 bp, Artificial Sequence; identical to SEQ ID NO: 1575
  source: /note="Description of Artificial Sequence: Synthetic polynucleotide"

SEQ ID NO: 1657 - DNA, 342 bp, Artificial Sequence; identical to SEQ ID NO: 1575
  source: /note="Description of Artificial Sequence: Synthetic polynucleotide"

SEQ ID NO: 1658 - DNA, 342 bp, Artificial Sequence; identical to SEQ ID NO: 1575
  source: /note="Description of Artificial Sequence: Synthetic polynucleotide"

SEQ ID NO: 1659 - DNA, 342 bp, Artificial Sequence; identical to SEQ ID NO: 1575
  source: /note="Description of Artificial Sequence: Synthetic polynucleotide"

SEQ ID NO: 1660 - DNA, 342 bp, Artificial Sequence; identical to SEQ ID NO: 1575
  source: /note="Description of Artificial Sequence: Synthetic polynucleotide"

SEQ ID NO: 1661 - DNA, 342 bp, Artificial Sequence; identical to SEQ ID NO: 1575
  source: /note="Description of Artificial Sequence: Synthetic polynucleotide"

SEQ ID NO: 1662 - DNA, 342 bp, Artificial Sequence; identical to SEQ ID NO: 1575
  source: /note="Description of Artificial Sequence: Synthetic polynucleotide"

SEQ ID NO: 1663 - DNA, 342 bp, Artificial Sequence; identical to SEQ ID NO: 1575
  source: /note="Description of Artificial Sequence: Synthetic polynucleotide"

SEQ ID NO: 1664 - DNA, 342 bp, Artificial Sequence; identical to SEQ ID NO: 1575
  source: /note="Description of Artificial Sequence: Synthetic polynucleotide"

SEQ ID NO: 1665 - DNA, 342 bp, Artificial Sequence
  source: /note="Description of Artificial Sequence: Synthetic polynucleotide"
gacatcgtgatgacccagtctccagactccctggctgtgtctctgggcgagagggccaccatcaactgcaagtccagccagagtgttttatccagctccaacaataagaactacatagcttggtaccagcagaaaccaggacaacctcctaagctgctcatttactgggcatctacccgggaatccggggtccctgaccgattcagtggcagcgggtctgggacagatttcactctcaccatcagcagcctgcaggctgaagatgtggcagttttttactgtcaacaatattatagtactccgtggacgttcggccaagggaccaaggtggaaatcaaacga

SEQ ID NO: 1666 - DNA, 342 bp, Artificial Sequence; identical to SEQ ID NO: 1665
  source: /note="Description of Artificial Sequence: Synthetic polynucleotide"

SEQ ID NO: 1667 - DNA, 342 bp, Artificial Sequence
  source: /note="Description of Artificial Sequence: Synthetic polynucleotide"
gacatcgtgatgacccagtctccagactccctgtctgtgtctctgggcgagagggccaccatcaactgcaagtccagccagagtgttttatccagctccaacaataagaactacttagcttggtaccaacagaaaccaggacagcctcctaacctgctcatttactggacttctacccgagaatccggggtccctgaccgattcagtggcagcgggtctgggacagatttcactctcaccatcaacagcctgcaggctgaagatgtggctgtttattactgtcagcaatattatcgtactccgtggacgttcggccaagggaccaaggtggaaatcaaacga

SEQ ID NO: 1668 - DNA, 342 bp, Artificial Sequence; identical to SEQ ID NO: 1667
  source: /note="Description of Artificial Sequence: Synthetic polynucleotide"

SEQ ID NO: 1669 - DNA, 342 bp, Artificial Sequence; identical to SEQ ID NO: 1577
  source: /note="Description of Artificial Sequence: Synthetic polynucleotide"

SEQ ID NO: 1670 - DNA, 342 bp, Artificial Sequence; identical to SEQ ID NO: 1667
  source: /note="Description of Artificial Sequence: Synthetic polynucleotide"

SEQ ID NO: 1671 - DNA, 342 bp, Artificial Sequence; identical to SEQ ID NO: 1667
  source: /note="Description of Artificial Sequence: Synthetic polynucleotide"

SEQ ID NO: 1672 - DNA, 342 bp, Artificial Sequence; identical to SEQ ID NO: 1577
  source: /note="Description of Artificial Sequence: Synthetic polynucleotide"

SEQ ID NO: 1673 - DNA, 342 bp, Artificial Sequence; identical to SEQ ID NO: 1577
  source: /note="Description of Artificial Sequence: Synthetic polynucleotide"

SEQ ID NO: 1674 - DNA, 342 bp, Artificial Sequence
  source: /note="Description of Artificial Sequence: Synthetic polynucleotide"
gacatcgtgatgacccagtctccagactccctggctgtgtctctgggcgagagggccaccatcaactgcaagtccagccagagtgttttatccagctccaacaataagaactacttagcttggtaccaacagaaaccaggacagcctcctaaactgctcatttactggacttctacccgagaatccggggtccctgaccgattcagtggcagcgggtctgggacagatttcactctcaccatcaacagcctgcaggctgaagatgtggctgtttattactgtcagcaatattatcgtactccgtggacgttcggccaagggaccaaggtggaaatcaaacga

SEQ ID NO: 1675 - DNA, 342 bp, Artificial Sequence; identical to SEQ ID NO: 1667
  source: /note="Description of Artificial Sequence: Synthetic polynucleotide"

SEQ ID NO: 1676 - DNA, 342 bp, Artificial Sequence; identical to SEQ ID NO: 1576
  source: /note="Description of Artificial Sequence: Synthetic polynucleotide"

SEQ ID NO: 1677 - DNA, 342 bp, Artificial Sequence; identical to SEQ ID NO: 1576
  source: /note="Description of Artificial Sequence: Synthetic polynucleotide"

SEQ ID NO: 1678 - DNA, 342 bp, Artificial Sequence; identical to SEQ ID NO: 1576
  source: /note="Description of Artificial Sequence: Synthetic polynucleotide"

SEQ ID NO: 1679 - DNA, 342 bp, Artificial Sequence; identical to SEQ ID NO: 1665
  source: /note="Description of Artificial Sequence: Synthetic polynucleotide"

SEQ ID NO: 1680 - DNA, 342 bp, Artificial Sequence; identical to SEQ ID NO: 1665
  source: /note="Description of Artificial Sequence: Synthetic polynucleotide"

SEQ ID NO: 1681 - DNA, 342 bp, Artificial Sequence; identical to SEQ ID NO: 1578
  source: /note="Description of Artificial Sequence: Synthetic polynucleotide"

SEQ ID NO: 1682 - DNA, 342 bp, Artificial Sequence; identical to SEQ ID NO: 1578
  source: /note="Description of Artificial Sequence: Synthetic polynucleotide"

SEQ ID NO: 1683 - DNA, 342 bp, Artificial Sequence; identical to SEQ ID NO: 1578
  source: /note="Description of Artificial Sequence: Synthetic polynucleotide"

SEQ ID NO: 1684 - DNA, 342 bp, Artificial Sequence; identical to SEQ ID NO: 1578
  source: /note="Description of Artificial Sequence: Synthetic polynucleotide"

SEQ ID NO: 1685 - DNA, 342 bp, Artificial Sequence; identical to SEQ ID NO: 1578
  source: /note="Description of Artificial Sequence: Synthetic polynucleotide"

SEQ ID NO: 1686 - DNA, 342 bp, Artificial Sequence; identical to SEQ ID NO: 1578
  source: /note="Description of Artificial Sequence: Synthetic polynucleotide"

SEQ ID NO: 1687 - DNA, 342 bp, Artificial Sequence; identical to SEQ ID NO: 1578
  source: /note="Description of Artificial Sequence: Synthetic polynucleotide"

SEQ ID NO: 1688 - DNA, 342 bp, Artificial Sequence
  source: /note="Description of Artificial Sequence: Synthetic polynucleotide"
gacatcgtgatgacccagtctccagactccctgtctgtgtctctgggcgagagggccaccatcaactgcaagtccagccagagtgttttatccagctccaacaataagaactacttagcttggtaccagcagaaaccaggacagcctcctaacctgctcatttactggacttctacccgagaatccggggtccctgaccgattcagtggcagcgggtctgggacagatttcactctcaccatcaacagcctgcaggctgaagatgtggctgtttattactgtcagcaatattatcgtactccgtggacgttcggccaagggaccaaggtggaaatcaaacga

SEQ ID NO: 1689 - DNA, 342 bp, Artificial Sequence; identical to SEQ ID NO: 1688
  source: /note="Description of Artificial Sequence: Synthetic polynucleotide"

SEQ ID NO: 1690 - DNA, 342 bp, Artificial Sequence; identical to SEQ ID NO: 1688
  source: /note="Description of Artificial Sequence: Synthetic polynucleotide"

SEQ ID NO: 1691 - DNA, 342 bp, Artificial Sequence; identical to SEQ ID NO: 1688
  source: /note="Description of Artificial Sequence: Synthetic polynucleotide"

SEQ ID NO: 1692 - DNA, 342 bp, Artificial Sequence
  source: /note="Description of Artificial Sequence: Synthetic polynucleotide"
gacatcgtgatgacccagtctccagactccctggctgtgtctctgggcgagagggccaccatcaactgcaagtccagccagagtgttttatccagctccaacaataagaactacttagcttggtaccagcagaaaccaggacagcctcctaaactgctcatttactggacttctacccgagattccggggtccctgaccgattcagtggcagcgggtctgggacagatttcactctcaccatcaacagcctgcaggctgaagatgtggctgtttattactgtcagcaatattatcgtactccgtggacgttcggccaagggaccaaggtggaaatcaaacga

SEQ ID NO: 1693 - DNA, 342 bp, Artificial Sequence
  source: /note="Description of Artificial Sequence: Synthetic polynucleotide"
gacatcgtgatgacccagtctccagactccctggctgtgtctctgggcgagagggccaccatcaactgcaagtccagccagagtgttttatccagctccaacaataagaactacttagcttggtaccagcagaaaccaggacagcctcctaaactgctcatttactggacttctacccgagaatccggggtccctgaccgattcagtggcagcgggtctgggacagatttcactctcaccatcaacagcctgcaggctgaagatgtggctgtttattactgtcagcaatattatcgtactccgtggacgttcggccaagggaccaaggtggaaatcaaacga

SEQ ID NO: 1694 - DNA, 333 bp, Artificial Sequence
  source: /note="Description of Artificial Sequence: Synthetic polynucleotide"
cagtctgtgctgactcagccaccctcagcgtctgggacccccgggcagagggtcaccatctcttgttctggaagtagctccaacatcggaagtcaaactgtaaactggtaccagcacctcccaggaacggcccccaaactcctcatctatactaataatcagcggccctcaggggtccctgaccgattctctggctccaagtctggcacctcagcctcccttgccatcagtgggctccagtctgaggatgaggctgattatttctgtgcaacattcgatgaaagcctgagtggtccggtattcggcggagggaccaagctgaccgtcctaggt

SEQ ID NO: 1695 - DNA, 333 bp, Artificial Sequence
  source: /note="Description of Artificial Sequence: Synthetic polynucleotide"
cagtctgtgctgactcagccaccctcagcgtctgggacccccgggcagagggtcaccatctcttgttctggaagtagctccaacatcggaagtcaaactgtaaactggtaccagcacctcccaggaacggcccccaaactcctcatctatactaataatcagcggccctcaggggtccctgaccgattctctggctccaagtctggcacctcagcctcccttgccatcagtgggctccagtctgaggatgaggctgattatttctgtgcaacattcgatgaaagcctgcaaggtccggtattcggcggagggaccaagctgaccgtcctaggt

SEQ ID NO: 1696 - DNA, 333 bp, Artificial Sequence
  source: /note="Description of Artificial Sequence: Synthetic polynucleotide"
cagtctgtgctgactcagccaccctcagcgtctgggacccccgggcagagggtcaccatctcttgttctggaagtagctccaacatcggaagtaattatgtaaactggtaccagcacctcccaggaacggcccccaaactcctcatctatactaataatcagcggccctcaggggtccctgaccgattctctggctccaagtctggcacctcagcctcccttgccatcagtgggctccagtctgaggatgaggctgattatttctgtgcaacattcgatgaaagcctgagtggtccggtattcggcggagggaccaagctgaccgtcctaggt

SEQ ID NO: 1697 - DNA, 333 bp, Artificial Sequence
  source: /note="Description of Artificial Sequence: Synthetic polynucleotide"
cagtctgtgctgactcagccaccctcagcgtctgggacccccgggcagagggtcaccatctcttgttctggaagtagctccaacatcggaagtaattatgtaaactggtaccagcacctcccaggaacggcccccaaactcctcatctatactaataatcagcggccctcaggggtccctgaccgattctctggctccaagtctggcacctcagcctcccttgccatcagtgggctccagtctgaggatgaggctgattatttctgtgcaacattcgatgaaagcctgcaaggtccggtattcggcggagggaccaagctgaccgtcctaggt

SEQ ID NO: 1698 - DNA, 333 bp, Artificial Sequence
  source: /note="Description of Artificial Sequence: Synthetic polynucleotide"
cagtctgtgctgactcagccaccctcagcgtctgggacccccgggcagagggtcaccatctcttgttctggaagtagctccaacatcggaagtcaaactgtaaactggtaccagcacctcccaggaacggcccccaaactcctcatctatactaataatcagcggccctcaggggtccctgaccgattctctggctccaagtctggcacctcagcctcccttgccatcagtgggctccagtctgaggatgaggctgattatttctgtgcaacattcgatgacagcctgaatggtccggtattcggcggagggaccaagctgaccgtcctaggt

SEQ ID NO: 1699 - DNA, 333 bp, Artificial Sequence
  source: /note="Description of Artificial Sequence: Synthetic polynucleotide"
cagtctgtgctgactcagccaccctcagcgtctgggacccccgggcagagggtcaccatctcttgttctggaagtagctccaacatcggaagtaattatgtaaactggtaccagcacctcccaggaacggcccccaaactcctcatctatactaataatcagcggccctcaggggtccctgaccgattctctggctccaagtctggcacctcagcctcccttgccatcagtgggctccagtctgaggatgaggctgattatttctgtgcaacattcgatgacagcctgaatggtccggtattcggcggagggaccaagctgaccgtcctaggt

SEQ ID NO: 1700 - DNA, 333 bp, Artificial Sequence
  source: /note="Description of Artificial Sequence: Synthetic polynucleotide"
cagtctgtgctgactcagccaccctcagcgtctgggacccccgggcagagggtcaccatctcttgttctggaagtagctccaacatcggaagtaatactgtaaactggtaccagcacctcccaggaacggcccccaaactcctcatctatactaataatcagcggccctcaggggtccctgaccgattctctggctccaagtctggcacctcagcctcccttgccatcagtgggctccagtctgaggatgaggctgattatttctgtgcaacattcgatgaaagcctgaatggtccggtattcggcggagggaccaagctgaccgtcctaggt

SEQ ID NO: 1701 - DNA, 333 bp, Artificial Sequence
  source: /note="Description of Artificial Sequence: Synthetic polynucleotide"
cagtctgtgctgactcagccaccctcagcgtctgggacccccgggcagagggtcaccatctcttgttctggaagtagctccaacatcggaagtaatactgtaaactggtaccagcacctcccaggaacggcccccaaactcctcatctatactaataatcagcggccctcaggggtccctgaccgattctctggctccaagtctggcacctcagcctcccttgccatcagtgggctccagtctgaggatgaggctgattatttctgtgcaacattcgatgacagcctgcaaggtccggtattcggcggagggaccaagctgaccgtcctaggt

SEQ ID NO: 1702 - DNA, 333 bp, Artificial Sequence
  source: /note="Description of Artificial Sequence: Synthetic polynucleotide"
cagtctgtgctgactcagccaccctcagcgtctgggacccccgggcagagggtcaccatctcttgttctggaagtagctccaacatcggaagtaatactgtaaactggtaccagcacctcccaggaacggcccccaaactcctcatctatactaataatcagcggccctcaggggtccctgaccgattctctggctccaagtctggcacctcagcctcccttgccatcagtgggctccagtctgaggatgaggctgattatttctgtgcaacattcgatgacagcctgagtggtccggtattcggcggagggaccaagctgaccgtcctaggt

SEQ ID NO: 1703 - DNA, 333 bp, Artificial Sequence
  source: /note="Description of Artificial Sequence: Synthetic polynucleotide"
cagtctgtgctgactcagccaccctcagcgtctgggacccccgggcagagggtcaccatctcttgttctggaagtagctccaacatcggaagtaatactgtaaactggtaccagcacctcccaggaacggcccccaaactcctcatctatactaataatcagcggccctcaggggtccctgaccgattctctggctccaagtctggcacctcagcctcccttgccatcagtgggctccagtctgaggatgaggctgattatttctgtgcaacattcgatgacagcctgaatgctccggtattcggcggagggaccaagctgaccgtcctaggt

SEQ ID NO: 1704 - DNA, 333 bp, Artificial Sequence
  source: /note="Description of Artificial Sequence: Synthetic polynucleotide"
cagtctgtgctgactcagccaccctcagcgtctgggacccccgggcagagggtcaccatctcttgttctggaagtagctccaacatcggaagtaatactgtaaactggtaccagcacctcccaggaacggcccccaaactcctcatctatactaataatcagcggccctcaggggtccctgaccgattctctggctccaagtctggcacctcagcctcccttgccatcagtgggctccagtctgaggatgaggctgattatttctgtgcaacattcgatagcagcctgaatggtccggtattcggcggagggaccaagctgaccgtcctaggt

SEQ ID NO: 1705 - DNA, 333 bp, Artificial Sequence
  source: /note="Description of Artificial Sequence: Synthetic polynucleotide"
cagtctgtgctgactcagccaccctcagcgtctgggacccccgggcagagggtcaccatctcttgttctggaagtagctccaacatcggaagtaattatgtaaactggtaccagcacctcccaggaacggcccccaaactcctcatctatactaataatcagcggccctcaggggtccctgaccgattctctggctccaagtctggcacctcagcctcccttgccatcagtgggctccagtctgaggatgaggctgattatttctgtgcaacattcgatagcagcctgaatgctccggtattcggcggagggaccaagctgaccgtcctaggt

SEQ ID NO: 1706 - DNA, 333 bp, Artificial Sequence; identical to SEQ ID NO: 1705
  source: /note="Description of Artificial Sequence: Synthetic polynucleotide"

SEQ ID NO: 1707 - DNA, 333 bp, Artificial Sequence; identical to SEQ ID NO: 1694
  source: /note="Description of Artificial Sequence: Synthetic polynucleotide"

SEQ ID NO: 1708 - DNA, 324 bp, Artificial Sequence
  source: /note="Description of Artificial Sequence: Synthetic polynucleotide"
gacatccagatgacccagtctccatcctccctgtctgcatctataggagacagagtcaccatcacttgccgggcaagtcaggaccttagaaattatttaggctggtatcaacagaaaccagggaaagcccctaagcgcctgatctatggtgcatccagtttgcaaagtggggtcccttcaaggttcagcggcagtggatctgggacagaattcactctcacaatcagcagcctgcagcctgaagatttcgcaacttattactgtctacagcataataattaccccttcactttcggccaagggaccaaagtggatatcaaacga

SEQ ID NO: 1709 - DNA, 324 bp, Artificial Sequence; identical to SEQ ID NO: 1592
  source: /note="Description of Artificial Sequence: Synthetic polynucleotide"

SEQ ID NO: 1710 - DNA, 333 bp, Artificial Sequence
  source: /note="Description of Artificial Sequence: Synthetic polynucleotide"
cagtctgtgctgactcagccaccctcagcgtctgggacccccgggcagagggtcaccatctcttgttctggaagtagctccaacatcggaagtaatactgtaaactggtaccagcaactcccaggaacggcccccaaactcctcatctatactaataatcagcggccctcaggggtccctgaccgattctctggctccaagtctggcacctcagcctcccttgccatcagtgggctccagtctgaggatgaggctgattatttctgtgcaacattcgatagcagcctgagtggtccggtattcggcggagggaccaagctgaccgtcctaggt

SEQ ID NO: 1711 - DNA, 324 bp, Artificial Sequence
  source: /note="Description of Artificial Sequence: Synthetic polynucleotide"
gacatccagctgacccagtctccatcctccctgtctgcatctgtaggagacagagtcactatcacttgccgggcaagtcagaccattagcaggtttttaaattggtatcagcagaaacctgggaaagcccctgagctcctgatctatgttgcatccagtttgcaaagtggggtcccatcaagattcagtggcagtggttctgggacagatttcactctcaccatcagcagtctgcaacctgaagattttgcaacttactactgtcaacagagttacagtaccctgatcagttttggccaggggaccaagctggagatcacacga

SEQ ID NO: 1712 - DNA, 333 bp, Artificial Sequence
  source: /note="Description of Artificial Sequence: Synthetic polynucleotide"
cagtctgtgttgacgcagccgccctcagtgtctgcggccccaggacagaaggtcaccatctcctgctctggaagcagctccaacattggaaataattatgtatcctggtatgagcagttcccaggaacagcccccaaactcctcatttatgacaataataagcgaccctcagggattcctgaccgattctctggctccaagtctggcacgtcagccaccctgggcatcaccggactccagactggggacgaggccgattattactgcggaacatgggatagcagcctgagtgctgtggtattcggcggagggaccaaactgaccgtcctaggt

SEQ ID NO: 1713 - DNA, 324 bp, Artificial Sequence
  source: /note="Description of Artificial Sequence: Synthetic polynucleotide"
gacatccagctgacccagtctccatcctccctgtctgcatctgtaggagacagagtcactatcacttgccgggcaagtcagaccattagcaggtttttaaattggtatcagcagaaacctgggaaagcccctgagctcctgatctatgttgcatccagtttgcaaagtggggtcccatcaagattcagtggcagtggttctgggacagatttcactctcaccatcagcagtctgcaacctgaagattttgcaacttactactgtcaacagagttacagtaccctgatcagttttggccaggggaccaagctggagatcaaacga

SEQ ID NO: 1714 - DNA, 324 bp, Artificial Sequence; identical to SEQ ID NO: 1713
  source: /note="Description of Artificial Sequence: Synthetic polynucleotide"

SEQ ID NO: 1715 - DNA, 324 bp, Artificial Sequence; identical to SEQ ID NO: 1711
  source: /note="Description of Artificial Sequence: Synthetic polynucleotide"

SEQ ID NO: 1716 - DNA, 324 bp, Artificial Sequence
  source: /note="Description of Artificial Sequence: Synthetic polynucleotide"
gacatccagctgacccagtctccatcctccctgtctgcatctgtaggagacagagtcactatcacttgccgggcaagtcagaccattagcaggtttttaaattggtatcagcagaaacctgggaaagcccctaagctcctgatctatgttgcatccagtttgcaaagtggggtcccatcaagattcagtggcagtggttctgggacagatttcactctcaccatcagcagtctgcaacctgaagattttgcaacttactactgtcaacagagttacagtaccctgatcagttttggccaggggaccaagctggagatcaaacga

SEQ ID NO: 1717 - DNA, 324 bp, Artificial Sequence; identical to SEQ ID NO: 1713
  source: /note="Description of Artificial Sequence: Synthetic polynucleotide"

SEQ ID NO: 1718 - DNA, 324 bp, Artificial Sequence; identical to SEQ ID NO: 1713
  source: /note="Description of Artificial Sequence: Synthetic polynucleotide"

SEQ ID NO: 1719 - DNA, 333 bp, Artificial Sequence
  source: /note="Description of Artificial Sequence: Synthetic polynucleotide"
cagtctgtgttgacgcagccgccctcagtgtctgcggccccaggacagaaggtcaccatctcctgctctggaagcagctccaacattggaaataattatgtatcctggtatcagcagctcccaggaacagcccccaaactcctcatttatgacaataataagcgaccctcagggattcctgaccgattctctggctccaagtctggcacgtcagccaccctgggcatcaccggactccagactggggacgaggccgattattactgcggaacatgggatagcagcctgagtgctgtggtattcggcggagggaccaaactgaccgtcctaggt

SEQ ID NO: 1720 - DNA, 333 bp, Artificial Sequence; identical to SEQ ID NO: 1719
  source: /note="Description of Artificial Sequence: Synthetic polynucleotide"

SEQ ID NO: 1721 - DNA, 333 bp, Artificial Sequence; identical to SEQ ID NO: 1712
  source: /note="Description of Artificial Sequence: Synthetic polynucleotide"

SEQ ID NO: 1722 - DNA, 333 bp, Artificial Sequence
  source: /note="Description of Artificial Sequence: Synthetic polynucleotide"
cagtctgtgttgacgcagccgccctcagtgtctgcggccccaggacagaaggtcaccatctcctgctctggaagcagctccaacattggaaataattatgtatcctggtatcagcagctcccaggaacagcccccaaactcctcatttatgacaataataagcgaccctcagggattcctgaccgattctctggctccaagtctggcacgtcagccaccctggccatcaccggactccagactggggacgaggccgattattactgcggaacattcgaaagcagcctgagtgctgtggtattcggcggagggaccaaactgaccgtcctaggt

SEQ ID NO: 1723 - DNA, 333 bp, Artificial Sequence
  source: /note="Description of Artificial Sequence: Synthetic polynucleotide"
cagtctgtgttgacgcagccgccctcagtgtctgcggccccaggacagaaggtcaccatctcctgctctggaagcagctccaacattggaaataattatgtatcctggtatcagcagctcccaggaacagcccccaaactcctcatttatgacaataataagcgaccctcagggattcctgaccgattctctggctccaagtctggcacgtcagccaccctggccatcaccggactccagactggggacgaggccgattattactgcggaacatgggatagcagcctgagtgctgtggtattcggcggagggaccaaactgaccgtcctaggt

SEQ ID NO: 1724 - DNA, 333 bp, Artificial Sequence; identical to SEQ ID NO: 1723
  source: /note="Description of Artificial Sequence: Synthetic polynucleotide"

SEQ ID NO: 1725 - DNA, 333 bp, Artificial Sequence; identical to SEQ ID NO: 1719
  source: /note="Description of Artificial Sequence: Synthetic polynucleotide"

SEQ ID NO: 1726 - DNA, 333 bp, Artificial Sequence; identical to SEQ ID NO: 1722
  source: /note="Description of Artificial Sequence: Synthetic polynucleotide"

SEQ ID NO: 1727 - DNA, 324 bp, Artificial Sequence
  source: /note="Description of Artificial Sequence: Synthetic polynucleotide"
gacatccagctgacccagtctccatcctccctgtctgcatctgtaggagacagagtcactatcacttgccgggcaagtcagaccattagcaggtttttaaattggtatcagcagaaacctgggaaagcccctaagctcctgatctatgttgcatccagtttgcaaagtggggtcccatcaagattcagtggcagtggttctgggacagatttcactctcaccatcagcagtctgcaacctgaagattttgcaacttactactgtcaacagagttacagtaccctgctcagttttggccaggggaccaagctggagatcaaacga

SEQ ID NO: 1728 - DNA, 384 bp, Artificial Sequence
  source: /note="Description of Artificial Sequence: Synthetic polynucleotide"
cagatgcaggtggtgcagtctggggctgaggtgaagaagcctggggcctcagtgaaggtctcctgcaaggcttccggatacaccttcaccggctactatatgcattgggtgcgacaggcccctggacaagggcttgagtggatgggatggatcaaccctaacagtggtggcacaaactatgcacagaagtttcagggcagggtcaccatgaccagggacacgtccatcagtacagcctacatggagctgagcaggctgaggtctgacgacacggccgtgtattactgtgcgagagggggggattacgtttgggggacttatcggcctcactactactacggtatggacgtctggggccaagggaccacggtcaccgtctcctca

SEQ ID NO: 1729 - DNA, 363 bp, Artificial Sequence
  source: /note="Description of Artificial Sequence: Synthetic polynucleotide"
caggtgcagctggtggagtctgggggaggcgtggtccagcctgggaggtccctgagactctcctgtgcagcgtctggattcactttcagtaactttggcatgcactgggtccgccaggctccaggcaaggggctggagtgggtggcagttatatggtatgatggaagtaatgaaaactatgcagactccgtgaagggccgattcaccatctccagagacaattccaagaatacgctgtatctgcacatgaacagcctgagagtcgcggacacggctgtgtattattgtgcgcgagatgggacgatctttggagtggtcttgggggactactggggccagggaaccctggtcaccgtctcctca

SEQ ID NO: 1730 - DNA, 363 bp, Artificial Sequence
  source: /note="Description of Artificial Sequence: Synthetic polynucleotide"
caggtgcagctggtggagtctgggggaggcgtggtccagcctgggaggtccctgagactctcctgtgcagcgtctggattcaccttcagttactttggcatgcactgggtccgccaggctccaggcaaggggctggagtgggtggcagttatatggtatgatggaagtaataaatactatgcagactccgtgaagggccgcttcaccatctccagagacaattccaagaacacgctgtatctgcaaatgaacagcctgagagccgaggacacggctgtgtattactgtgcgcgagatgggacgatttttggagtgctcttgggggactactggggccagggaaccctggtcaccgtctcctca

SEQ ID NO: 1731 - DNA, 360 bp, Artificial Sequence
  source: /note="Description of Artificial Sequence: Synthetic polynucleotide"
caggtgcaactggtggagtctgggggaggcgtggtccagcctgggaggtccctgagactctcctgtgcagcgtctggattcaccttcagtagctatggcatgcactgggtccgccaggctccaggcaaggggctggagtgggtggcagttatatggtatgatggaagtaataaatactatgcagactccgtgaagggccgattcaccatctccagcgacaattccaagaacacgctgtatctgcaaatgaacagcctgagagccgaggacacggctgtgtattactgtgcgagagataggacgatttttggagtggttcttgactactggggccagggaaccctggtcaccgtctcctca

SEQ ID NO: 1732 - DNA, 369 bp, Artificial Sequence
  source: /note="Description of Artificial Sequence: Synthetic polynucleotide"
caggtgccgctggtgcagtctggggctgaggtgaagaagcctggggcctcagtgaaggtctcctgcaaggcttctggatacaccttcaccggctactatatccactgggtgcgacaggcccctggacaagggcttgagtggatggggtggatcaaccctgacagtggtggcacagactattcacagaggtttcagggcaggttcaccatgaccagggacacgtccatcagcacagcctacatggaactgaacaggctgagatctgacgacacggccgtgtattactgtgcgagagaggccacgatttttggaatggttattgtaccgtttgactactggggccagggaaccctggtcaccgtctcctca

SEQ ID NO: 1733 - DNA, 369 bp, Artificial Sequence
  source: /note="Description of Artificial Sequence: Synthetic polynucleotide"
caggtgccgctggtgcagtctggggctgaggtgaagaagcctggggcctcagtgaaggtctcctgcaaggcttctggatacaccttcaccggctactatatccactgggtgcgacaggcccctggacaaggacttgagtggatggggtggatcaaccctgacagtggtggcacagactattcacagaggtttcagggcaggttcaccatgaccagggacacgtccatcagcacagcctacatggaactgagcaggctgagatctgacgacacggccgtgtattactgtgcgagagaggccacgatttttggaatggttattgtaccgtttgactactggggccagggaaccctggtcaccgtctcctca

SEQ ID NO: 1734 - DNA, 369 bp, Artificial Sequence
  source: /note="Description of Artificial Sequence: Synthetic polynucleotide"
caggtgccgctggtacagtctggggctgaggtgaagaagcctggggcctcagtgaaggtctcctgcaaggcttctggatacaccttcaccggctactatatacactgggtgcgtcaggcccctggacaagggcttgtgtggatggggtggatcagccctaacagtggtgacacaagctatgcacagaagtttcaggacagggtcaccatgaccagggacacgtccatcagcacagcctatatggagctgagcagactgagatctgacgacacggccgtgtatttctgtacgagagaggccacgatttttggaatgcttattgtaccatttgactactggggccagggaaccctggtcaccgtctcctca

SEQ ID NO: 1735 - DNA, 369 bp, Artificial Sequence
  source: /note="Description of Artificial Sequence: Synthetic polynucleotide"
caggtgccgctggtgcagtctggggctgaggtgaagaagcctggggcctcagtgaaggtctcctgcaaggcttctggatacaccttcaccggctactatatacactgggtgcgtcaggcccctggacaagggcttgagtggatggggtggataagccctaacaatggtgacacaaactatgcacagaagtttcaggacagggtcaccatgaccagggacacgtccatcagcacagcctatatggagctgagcaggctgagatctgacgacacggccgtgtattactgtacgagagaggccacgatttttggaatgcttattgtaccatttgactactggggccagggaaccctggtcaccgtctcctca

SEQ ID NO: 1736 - DNA, 378 bp, Artificial Sequence
  source: /note="Description of Artificial Sequence: Synthetic polynucleotide"
caggtgcagttgcaggagtcgggcccaggactggtgaagccttcacagaccctgtccctcacctgcactgtctctggtgactccatcagcagtggtggttactactggagctggatccgccagcacccagggaagggcctggagtggattgggtacatctattacagtgggagcacctactacaacccgtccctcaagagtcgagttaccatatcagtagacacgtctaagaaccagttctccctgaagctgagctctgtgactgccgcggacacggccgtgtattactgtgcgagagatcgtattacgatttttggagtggttatggggggcggtatggacgtctggggccaagggaccacggtcaccgtctcctca

SEQ ID NO: 1737 - DNA, 360 bp, Artificial Sequence
  source: /note="Description of Artificial Sequence: Synthetic polynucleotide"
caggtgcagctggtggagtctgggggaggcgtggtccagcctgggaggtccctgagactctcctgtgcagcatctggattcaccttcagtaactatggcatgcactgggtccgccaggctccaggcgaggggctggagtgggtggcagctatatggtttgatggaagtgataaatactatgcagactccgtgaagggccgattcaccatctccagagacaactccaagaacacgctgtatctgcaaatgaacagcctgagagccgaggacacggctgtgtattactgtgcgagagatcaggcgatttttggagtggtccccgactactggggccagggaaccctggtcaccgtctcctca

SEQ ID NO: 1738 - DNA, 363 bp, Artificial Sequence; identical to SEQ ID NO: 1730
  source: /note="Description of Artificial Sequence: Synthetic polynucleotide"

SEQ ID NO: 1739 - DNA, 360 bp, Artificial Sequence
  source: /note="Description of Artificial Sequence: Synthetic polynucleotide"
caggtgcagctggtggagtctgggggaggcgtggtccagcctgggaggtccctgagactctcctgtgcagcgtctggattctccttcagtagctatggcatgcactgggtccgccagcctccaggcaaggggctggagtgggtggcagctatatggtatgatggaaataataaatactatgcagactccgtgaagggccgattcaccatctccagagacagttccaagaacacgctgtatctgcaaatgaacagcctgagagccgaggacacggctgtgtattactgtgcgagagatcggacgatttttggagtggtccttgagtacctcggccagggaaccctggtcaccgtctcctca

SEQ ID NO: 1740 - DNA, 351 bp, Artificial Sequence
  source: /note="Description of Artificial Sequence: Synthetic polynucleotide"
caggtgcagctgcaggagtcgggcccaggactggtgaagccttcggagaccctgtccctcacctgcactgtctctcagggctccatcagtagttactactggagctggatccggcagcccgccgggaagggactagagtggattggccgtatctataccagtgggagcaccaactacaacccctccctcaagagtcgagtcaccatgtcaatagacacgtccaagaaccagttctccctgaaactgaactctgtgaccgccgcggacacggccgtgtattactgtgcgagagatgtagcagtggctggctttgactactggggccagggaaccctggtcaccgtctcctca

SEQ ID NO: 1741 - DNA, 351 bp, Artificial Sequence
  source: /note="Description of Artificial Sequence: Synthetic polynucleotide"
caggtgcagctgcaggagtcgggcccaggactggtgaagccttcggagaccctgtccctcacctgcactgtctctgggggctccatcagtagttactactggagctggatccggcagcccgccgggaagggactagagtggattggccgtatctataccagtgggagcaccaactacaacccctccctcaagagtcgagtcaccatgtcaatagacacgtccaagaaccagttctccctgaaactgaactctgtgaccgccgcggacacggccgtgtattactgtgcgagagatgtagcagtggctggctttgactactggggccagggaaccctggtcaccgtctcctca

SEQ ID NO: 1742 - DNA, 363 bp, Artificial Sequence
  source: /note="Description of Artificial Sequence: Synthetic polynucleotide"
caggtgcagctggtggagtctgggggaggcgtggtccagcctgggaggtccctgagactctcctgtgcagcgtctggattcaccttcagttactttggcatgcactgggtccgccaggctccaggcaaggggctggagtgggtggcagttatatggtatgatgcaagtaataaatactatgcagacgccgtgaagggccgcttcaccatctccagagacaattccaagaacacgctgtatctgcaaatgaacagcctgagagccgaggacacggctgtgtattactgtgcgcgagatgggacgatttttggagtgctcttgggggactactggggccagggaaccctggtcaccgtctcctca

SEQ ID NO: 1743 - DNA, 363 bp, Artificial Sequence
  source: /note="Description of Artificial Sequence: Synthetic polynucleotide"
caggtgcagctggtggagtctgggggaggcgtggtccagcctgggaggtccctgagactctcctgtgcagcgtctggattcaccttcagttactttggcatgcactgggtccgccaggctccaggcaaggggctggagtgggtggcagttatatggtatgatgcaagtaataaatactatgcagactccgtgaagggccgcttcaccatctccagagacaattccaagaacacgctgtatctgcaaatgaacagcctgagagccgaggacacggctgtgtattactgtgcgcgagatgggacgatttttggagtgctcttgggggactactggggccagggaaccctggtcaccgtctcctca

SEQ ID NO: 1744 - DNA, 363 bp, Artificial Sequence
  source: /note="Description of Artificial Sequence: Synthetic polynucleotide"
caggtgcagctggtggagtctgggggaggcgtggtccagcctgggaggtccctgagactctcctgtgcagcgtctggattcaccttcagttactttggcatgcactgggtccgccaggctccaggcaaggggctggagtgggtggcagttatatggtatgatggaagtaataaatactatgcagacgccgtgaagggccgcttcaccatctccagagacaattccaagaacacgctgtatctgcaaatgaacagcctgagagccgaggacacggctgtgtattactgtgcgcgagatgggacgatttttggagtgctcttgggggactactggggccagggaaccctggtcaccgtctcctca

SEQ ID NO: 1745 - DNA, 363 bp, Artificial Sequence; identical to SEQ ID NO: 1742
  source: /note="Description of Artificial Sequence: Synthetic polynucleotide"

SEQ ID NO: 1746 - DNA, 363 bp, Artificial Sequence; identical to SEQ ID NO: 1742
  source: /note="Description of Artificial Sequence: Synthetic polynucleotide"

SEQ ID NO: 1747 - DNA, 363 bp, Artificial Sequence
  source: /note="Description of Artificial Sequence: Synthetic polynucleotide"
caggtgcagctggtggagtctgggggaggcgtggtccagcctgggaggtccctgagactctcctgtgcagcgtctggattcaccttcagttactttggcatgcactgggtccgccaggctccaggcaaggggctggagtgggtggcagttatatggtatgatgcaagtaataaatactatgcagacgccgtgaagggccgcttcaccatctccagagacaattccaagaacacgctgtatctgcaaatgaacagcctgagagccgaggacacggctgtgtattactgtgcgcgagataggacgatttttggagtgctcttgggggactactggggccagggaaccctggtcaccgtctcctca

SEQ ID NO: 1748 - DNA, 363 bp, Artificial Sequence
  source: /note="Description of Artificial Sequence: Synthetic polynucleotide"
caggtgcagctggtggagtctgggggaggcgtggtccagcctgggaggtccctgagactctcctgtgcagcgtctggattcactttcagtaactttggcatgcactgggtccgccaggctccaggcaaggggctggagtgggtggcagttatatggtatgatgcaagtaatgaaaactatgcagacgccgtgaagggccgattcaccatctccagagacaattccaagaatacgctgtatctgcaaatgaacagcctgagagtcgcggacacggctgtgtattattgtgcgcgagatgggacgatctttggagtggtcttgggggactactggggccagggaaccctggtcaccgtctcctca

SEQ ID NO: 1749 - DNA, 363 bp, Artificial Sequence; identical to SEQ ID NO: 1748
  source: /note="Description of Artificial Sequence: Synthetic polynucleotide"

SEQ ID NO: 1750 - DNA, 363 bp, Artificial Sequence; identical to SEQ ID NO: 1748
  source: /note="Description of Artificial Sequence: Synthetic polynucleotide"

SEQ ID NO: 1751 - DNA, 363 bp, Artificial Sequence
  source: /note="Description of Artificial Sequence: Synthetic polynucleotide"
caggtgcagctggtggagtctgggggaggcgtggtccagcctgggaggtccctgagactctcctgtgcagcgtctggattcactttcagtaactttggcatgcactgggtccgccaggctccaggcaaggggctggagtgggtggcagttatatggtatgatgcaagtaatgaaaactatgcagactccgtgaagggccgattcaccatctccagagacaattccaagaatacgctgtatctgcacatgaacagcctgagagtcgcggacacggctgtgtattattgtgcgcgagatgggacgatctttggagtggtcttgggggactactggggccagggaaccctggtcaccgtctcctca

SEQ ID NO: 1752 - DNA, 363 bp, Artificial Sequence
  source: /note="Description of Artificial Sequence: Synthetic polynucleotide"
caggtgcagctggtggagtctgggggaggcgtggtccagcctgggaggtccctgagactctcctgtgcagcgtctggattcactttcagtaactttggcatgcactgggtccgccaggctccaggcaaggggctggagtgggtggcagttatatggtatgatggaagtaatgaaaactatgcagacgccgtgaagggccgattcaccatctccagagacaattccaagaatacgctgtatctgcacatgaacagcctgagagtcgcggacacggctgtgtattattgtgcgcgagatgggacgatctttggagtggtcttgggggactactggggccagggaaccctggtcaccgtctcctca

SEQ ID NO: 1753 - DNA, 363 bp, Artificial Sequence
  source: /note="Description of Artificial Sequence: Synthetic polynucleotide"
caggtgcagctggtggagtctgggggaggcgtggtccagcctgggaggtccctgagactctcctgtgcagcgtctggattcactttcagtaactttggcatgcactgggtccgccaggctccaggcaaggggctggagtgggtggcagttatatggtatgatgcaagtaatgaaaactatgcagacgccgtgaagggccgattcaccatctccagagacaattccaagaatacgctgtatctgcaaatgaacagcctgagagtcgaggacacggctgtgtattattgtgcgcgagataggacgatctttggagtggtcttgggggactactggggccagggaaccctggtcaccgtctcctca

SEQ ID NO: 1754 - DNA, 363 bp, Artificial Sequence
  source: /note="Description of Artificial Sequence: Synthetic polynucleotide"
caggtgcagctggtggagtctgggggaggcgtggtccagcctgggaggtccctgagactctcctgtgcagcgtctggattcactttcagtaactttggcatgcactgggtccgccaggctccaggcaaggggctggagtgggtggcagttatatggtatgatgcaagtaatgaaaactatgcagacgccgtgaagggccgattcaccatctccagagacaattccaagaatacgctgtatctgcaaatgaacagcctgagagtcgaggacacggctgtgtattattgtgcgcgagatgggacgatctttggagtggtcttgggggactactggggccagggaaccctggtcaccgtctcctca

SEQ ID NO: 1755 - DNA, 363 bp, Artificial Sequence
  source: /note="Description of Artificial Sequence: Synthetic polynucleotide"
caggtgcagctggtggagtctgggggaggcgtggtccagcctgggaggtccctgagactctcctgtgcagcgtctggattcactttcagtaactttggcatgcactgggtccgccaggccccaggcaaggggctggagtgggtggcagttatatggtatgatggaagtaatgaaaactatgcagactccgtgaagggccgattcaccatctccagagacaattccaagaacacgctgtatctgcacatgaacagcctgagagccgcggacacggctgtgtattactgtgcgagagatgggacgatctttggagtggtcttgggggactactggggccagggaaccctggtcaccgtctcctca

SEQ ID NO: 1756 - DNA, 363 bp, Artificial Sequence
  source: /note="Description of Artificial Sequence: Synthetic polynucleotide"
caggtgcagctggtggagtctgggggaggcgtggtccagcctgggaggtccctgagactctcctgtgcagcgtctggattcactttcagtaactttggcatgcactgggtccgccaggccccaggcaaggggctggagtgggtggcagttatatggtatgatgcaagtaatgaaaactatgcagacgccgtgaagggccgattcaccatctccagagacaattccaagaacacgctgtatctgcaaatgaacagcctgagagccgcggacacggctgtgtattactgtgcgagagatgggacgatctttggagtggtcttgggggactactggggccagggaaccctggtcaccgtctcctca

SEQ ID NO: 1757 - DNA, 363 bp, Artificial Sequence
  source: /note="Description of Artificial Sequence: Synthetic polynucleotide"
caggtgcagctggtggagtctgggggaggcgtggtccagcctgggaggtccctgagactctcctgtgcagcgtctggattcactttcagtaactttggcatgcactgggtccgccaggccccaggcaaggggctggagtgggtggcagttatatggtatgatgcaagtaatgaaaactatgcagacgccgtgaagggccgattcaccatctccagagacaattccaagaacacgctgtatctgcacatgaacagcctgagagccgcggacacggctgtgtattactgtgcgagagatgggacgatctttggagtggtcttgggggactactggggccagggaaccctggtcaccgtctcctca

SEQ ID NO: 1758 - DNA, 363 bp, Artificial Sequence; identical to SEQ ID NO: 1756
  source: /note="Description of Artificial Sequence: Synthetic polynucleotide"

SEQ ID NO: 1759 - DNA, 363 bp, Artificial Sequence; identical to SEQ ID NO: 1756
  source: /note="Description of Artificial Sequence: Synthetic polynucleotide"

SEQ ID NO: 1760 - DNA, 363 bp, Artificial Sequence; identical to SEQ ID NO: 1757
  source: /note="Description of Artificial Sequence: Synthetic polynucleotide"

SEQ ID NO: 1761 - DNA, 363 bp, Artificial Sequence; identical to SEQ ID NO: 1757
  source: /note="Description of Artificial Sequence: Synthetic polynucleotide"

SEQ ID NO: 1762 - DNA, 363 bp, Artificial Sequence; identical to SEQ ID NO: 1756
  source: /note="Description of Artificial Sequence: Synthetic polynucleotide"

SEQ ID NO: 1763 - DNA, 363 bp, Artificial Sequence
  source: /note="Description of Artificial Sequence: Synthetic polynucleotide"
caggtgcagctggtggagtctgggggaggcgtggtccagcctgggaggtccctgagactctcctgtgcagcgtctggattcactttcagtaactttggcatgcactgggtccgccaggccccaggcaaggggctggagtgggtggcagttatatggtatgatggaagtaatgaaaactatgcagacgccgtgaagggccgattcaccatctccagagacaattccaagaacacgctgtatctgcaaatgaacagcctgagagccgcggacacggctgtgtattactgtgcgagagatgggacgatctttggagtggtcttgggggactactggggccagggaaccctggtcaccgtctcctca

SEQ ID NO: 1764 - DNA, 363 bp, Artificial Sequence
  source: /note="Description of Artificial Sequence: Synthetic polynucleotide"
caggtgcagctggtggagtctgggggaggcgtggtccagcctgggaggtccctgagactctcctgtgcagcgtctggattcactttcagtaactttggcatgcactgggtccgccaggccccaggcaaggggctggagtgggtggcagttatatggtatgatgcaagtaatgaaaactatgcagactccgtgaagggccgattcaccatctccagagacaattccaagaacacgctgtatctgcaaatgaacagcctgagagccgcggacacggctgtgtattactgtgcgagagatgggacgatctttggagtggtcttgggggactactggggccagggaaccctggtcaccgtctcctca

SEQ ID NO: 1765 - DNA, 363 bp, Artificial Sequence
  source: /note="Description of Artificial Sequence: Synthetic polynucleotide"
caggtgcagctggtggagtctgggggaggcgtggtccagcctgggaggtccctgagactctcctgtgcagcgtctggattcactttcagtaactttggcatgcactgggtccgccaggccccaggcaaggggctggagtgggtggcagttatatggtatgatgcaagtaatgaaaactatgcagacgccgtgaagggccgattcaccatctccagagacaattccaagaacacgctgtatctgcaaatgaacagcctgagagccgaggacacggctgtgtattactgtgcgagagataggacgatctttggagtggtcttgggggactactggggccagggaaccctggtcaccgtctcctca

SEQ ID NO: 1766 - DNA, 363 bp, Artificial Sequence
  source: /note="Description of Artificial Sequence: Synthetic polynucleotide"
caggtgcagctggtggagtctgggggaggcgtggtccagcctgggaggtccctgagactctcctgtgcagcgtctggattcactttcagtaactttggcatgcactgggtccgccaggccccaggcaaggggctggagtgggtggcagttatatggtatgatgcaagtaatgaaaactatgcagacgccgtgaagggccgattcaccatctccagagacaattccaagaacacgctgtatctgcaaatgaacagcctgagagccgaggacacggctgtgtattactgtgcgagagatgggacgatctttggagtggtcttgggggactactggggccagggaaccctggtcaccgtctcctca

SEQ ID NO: 1767 - DNA, 360 bp, Artificial Sequence
  source: /note="Description of Artificial Sequence: Synthetic polynucleotide"
caggtgcaactggtggagtctgggggaggcgtggtccagcctgggaggtccctgagactctcctgtgcagcgtctggattcaccttcagtagctatggcatgcactgggtccgccaggctccaggcaaggggctggagtgggtggcagttatatggtatgatgcaagtaataaatactatgcagacgccgtgaagggccgattcaccatctccagggacaattccaagaacacgctgtatctgcaaatgaacagcctgagagccgaggacacggctgtgtattactgtgcgagagataggacgatttttggagtggttcttgactactggggccagggaaccctggtcaccgtctcctca

SEQ ID NO: 1768 - DNA, 360 bp, Artificial Sequence
  source: /note="Description of Artificial Sequence: Synthetic polynucleotide"
caggtgcaactggtggagtctgggggaggcgtggtccagcctgggaggtccctgagactctcctgtgcagcgtctggattcaccttcagtagctatggcatgcactgggtccgccaggctccaggcaaggggctggagtgggtggcagttatatggtatgatgcaagtaataaatactatgcagacgccgtgaagggccgattcaccatctccagcgacaattccaagaacacgctgtatctgcaaatgaacagcctgagagccgaggacacggctgtgtattactgtgcgagagataggacgatttttggagtggttcttgactactggggccagggaaccctggtcaccgtctcctca

SEQ ID NO: 1769 - DNA, 360 bp, Artificial Sequence; identical to SEQ ID NO: 1767
  source: /note="Description of Artificial Sequence: Synthetic polynucleotide"

SEQ ID NO: 1770 - DNA, 360 bp, Artificial Sequence; identical to SEQ ID NO: 1767
  source: /note="Description of Artificial Sequence: Synthetic polynucleotide"

SEQ ID NO: 1771 - DNA, 360 bp, Artificial Sequence; identical to SEQ ID NO: 1768
  source: /note="Description of Artificial Sequence: Synthetic polynucleotide"

SEQ ID NO: 1772 - DNA, 360 bp, Artificial Sequence; identical to SEQ ID NO: 1768
  source: /note="Description of Artificial Sequence: Synthetic polynucleotide"

SEQ ID NO: 1773 - DNA, 360 bp, Artificial Sequence; identical to SEQ ID NO: 1767
  source: /note="Description of Artificial Sequence: Synthetic polynucleotide"

SEQ ID NO: 1774 - DNA, 360 bp, Artificial Sequence
  source: /note="Description of Artificial Sequence: Synthetic polynucleotide"
caggtgcaactggtggagtctgggggaggcgtggtccagcctgggaggtccctgagactctcctgtgcagcgtctggattcaccttcagtagctatggcatgcactgggtccgccaggctccaggcaaggggctggagtgggtggcagttatatggtatgatgcaagtaataaatactatgcagactccgtgaagggccgattcaccatctccagggacaattccaagaacacgctgtatctgcaaatgaacagcctgagagccgaggacacggctgtgtattactgtgcgagagataggacgatttttggagtggttcttgactactggggccagggaaccctggtcaccgtctcctca

SEQ ID NO: 1775 - DNA, 360 bp, Artificial Sequence
  source: /note="Description of Artificial Sequence: Synthetic polynucleotide"
caggtgcaactggtggagtctgggggaggcgtggtccagcctgggaggtccctgagactctcctgtgcagcgtctggattcaccttcagtagctatggcatgcactgggtccgccaggctccaggcaaggggctggagtgggtggcagttatatggtatgatggaagtaataaatactatgcagacgccgtgaagggccgattcaccatctccagggacaattccaagaacacgctgtatctgcaaatgaacagcctgagagccgaggacacggctgtgtattactgtgcgagagataggacgatttttggagtggttcttgactactggggccagggaaccctggtcaccgtctcctca

SEQ ID NO: 1776 - DNA, 363 bp, Artificial Sequence; identical to SEQ ID NO: 1742
  source: /note="Description of Artificial Sequence: Synthetic polynucleotide"

SEQ ID NO: 1777 - DNA, 363 bp, Artificial Sequence; identical to SEQ ID NO: 1747
  source: /note="Description of Artificial Sequence: Synthetic polynucleotide"

SEQ ID NO: 1778 - DNA, 363 bp, Artificial Sequence; identical to SEQ ID NO: 1742
  source: /note="Description of Artificial Sequence: Synthetic polynucleotide"

SEQ ID NO: 1779 - DNA, 363 bp, Artificial Sequence; identical to SEQ ID NO: 1747
  source: /note="Description of Artificial Sequence: Synthetic polynucleotide"

SEQ ID NO: 1780 - DNA, 363 bp, Artificial Sequence; identical to SEQ ID NO: 1730
  source: /note="Description of Artificial Sequence: Synthetic polynucleotide"

SEQ ID NO: 1781 - DNA, 363 bp, Artificial Sequence; identical to SEQ ID NO: 1743
  source: /note="Description of Artificial Sequence: Synthetic polynucleotide"

SEQ ID NO: 1782 - DNA, 363 bp, Artificial Sequence; identical to SEQ ID NO: 1744
  source: /note="Description of Artificial Sequence: Synthetic polynucleotide"

SEQ ID NO: 1783 - DNA, 360 bp, Artificial Sequence
  source: /note="Description of Artificial Sequence: Synthetic polynucleotide"
caggtgcagctggtggagtctgggggaggcgtggtccagcctgggaggtccctgagactctcctgtgcagcgtctggattctccttcagtagctatggcatgcactgggtccgccagcctccaggcaaggggctggagtgggtggcagctatatggtatgatgcaaataataaatactatgcagacgccgtgaagggccgattcaccatctccagagacagttccaagaacacgctgtatctgcaaatgaacagcctgagagccgaggacacggctgtgtattactgtgcgagagatcggacgatttttggagtggtccttgagtactggggccagggaaccctggtcaccgtctcctca

SEQ ID NO: 1784 - DNA, 360 bp, Artificial Sequence; identical to SEQ ID NO: 1783
  source: /note="Description of Artificial Sequence: Synthetic polynucleotide"

SEQ ID NO: 1785 - DNA, 360 bp, Artificial Sequence
  source: /note="Description of Artificial Sequence: Synthetic polynucleotide"
caggtgcagctggtggagtctgggggaggcgtggtccagcctgggaggtccctgagactctcctgtgcagcgtctggattctccttcagtagctatggcatgcactgggtccgccagcctccaggcaaggggctggagtgggtggcagctatatggtatgatgcaaataataaatactatgcagacgccgtgaagggccgattcaccatctccagagacagttccaagaacacgctgtatctgcaaatgaacagcctgagagccgaggacacggctgtgtattactgtgcgagagatcggacgatttttggagtggtccttgagtacctcggccagggaaccctggtcaccgtctcctca

SEQ ID NO: 1786 - DNA, 360 bp, Artificial Sequence; identical to SEQ ID NO: 1783
  source: /note="Description of Artificial Sequence: Synthetic polynucleotide"

SEQ ID NO: 1787 - DNA, 360 bp, Artificial Sequence; identical to SEQ ID NO: 1785
  source: /note="Description of Artificial Sequence: Synthetic polynucleotide"

SEQ ID NO: 1788 - DNA, 360 bp, Artificial Sequence; identical to SEQ ID NO: 1785
  source: /note="Description of Artificial Sequence: Synthetic polynucleotide"

SEQ ID NO: 1789 - DNA, 360 bp, Artificial Sequence; identical to SEQ ID NO: 1783
  source: /note="Description of Artificial Sequence: Synthetic polynucleotide"

SEQ ID NO: 1790 - DNA, 360 bp, Artificial Sequence
  source: /note="Description of Artificial Sequence: Synthetic polynucleotide"
caggtgcagctggtggagtctgggggaggcgtggtccagcctgggaggtccctgagactctcctgtgcagcgtctggattctccttcagtagctatggcatgcactgggtccgccagcctccaggcaaggggctggagtgggtggcagctatatggtatgatggaaataataaatactatgcagacgccgtgaagggccgattcaccatctccagagacagttccaagaacacgctgtatctgcaaatgaacagcctgagagccgaggacacggctgtgtattactgtgcgagagatcggacgatttttggagtggtccttgagtactggggccagggaaccctggtcaccgtctcctca

SEQ ID NO: 1791 - DNA, 360 bp, Artificial Sequence
  source: /note="Description of Artificial Sequence: Synthetic polynucleotide"
caggtgcagctggtggagtctgggggaggcgtggtccagcctgggaggtccctgagactctcctgtgcagcgtctggattctccttcagtagctatggcatgcactgggtccgccagcctccaggcaaggggctggagtgggtggcagctatatggtatgatgcaaataataaatactatgcagactccgtgaagggccgattcaccatctccagagacagttccaagaacacgctgtatctgcaaatgaacagcctgagagccgaggacacggctgtgtattactgtgcgagagatcggacgatttttggagtggtccttgagtactggggccagggaaccctggtcaccgtctcctca

SEQ ID NO: 1792 - DNA, 360 bp, Artificial Sequence; identical to SEQ ID NO: 1783
  source: /note="Description of Artificial Sequence: Synthetic polynucleotide"

SEQ ID NO: 1793 - DNA, 360 bp, Artificial Sequence; identical to SEQ ID NO: 1785
  source: /note="Description of Artificial Sequence: Synthetic polynucleotide"

SEQ ID NO: 1794 - DNA, 360 bp, Artificial Sequence
  source: /note="Description of Artificial Sequence: Synthetic polynucleotide"
caggtgcagctggtggagtctgggggaggcgtggtccagcctgggaggtccctgagactctcctgtgcagcgtctggattcagtttcagtagctatggcatgcactgggtccgccaggctccaggcaagggactggagtgggtggcagttatatggtatgatgcaagtaataaatactatgaagacgccgtgaagggccgattcaccatctccagagacaattccaagaacacgctgtttctgcaagtgaacagcctgagagccgaggacacggctgtgtattactgtgcgagagggattacgatttttggtcatgggtttgaatattggggccagggaaccctggtcaccgtctcctca

SEQ ID NO: 1795 - DNA, 360 bp, Artificial Sequence
  source: /note="Description of Artificial Sequence: Synthetic polynucleotide"
caggtgcagctggtggagtctgggggaggcgtggtccagcctgggaggtccctgagactctcctgtgcagcgtctggattcagtttcagtagctatggcatgcactgggtccgccaggctccaggcaagggactggagtgggtggcagttatatggtatgatggaagtaataaatactatgaagactccgtgaagggccgattcaccatctccagagacaattccaagaacacgctgtttctgcaagtgaacagcctgagagccgaggacacggctgtgtattactgtgcgagagggattacgatttttggtcatgggtttgaatattggggccagggaaccctggtcaccgtctcctca

SEQ ID NO: 1796 - DNA, 360 bp, Artificial Sequence
  source: /note="Description of Artificial Sequence: Synthetic polynucleotide"
caggtgcagctggtggagtctgggggaggcgtggtccagcctgggaggtccctgagactctcctgtgcagcgtctggattcagtttcagtagctatggcatgcactgggtccgccaggctccaggcaagggactggagtgggtggcagttatatggtatgatggaagtaataaatactatgaagacgccgtgaagggccgattcaccatctccagagacaattccaagaacacgctgtttctgcaagtgaacagcctgagagccgaggacacggctgtgtattactgtgcgagagggattacgatttttggtcatgggtttgaatattggggccagggaaccctggtcaccgtctcctca

SEQ ID NO: 1797 - DNA, 360 bp, Artificial Sequence
  source: /note="Description of Artificial Sequence: Synthetic polynucleotide"
caggtgcagctggtggagtctgggggaggcgtggtccagcctgggaggtccctgagactctcctgtgcagcgtctggattcagtttcagtagctatggcatgcactgggtccgccaggctccaggcaagggactggagtgggtggcagttatatggtatgatgcaagtaataaatactatgaagactccgtgaagggccgattcaccatctccagagacaattccaagaacacgctgtttctgcaagtgaacagcctgagagccgaggacacggctgtgtattactgtgcgagagggattacgatttttggtcatgggtttgaatattggggccagggaaccctggtcaccgtctcctca

SEQ ID NO: 1798 - DNA, 360 bp, Artificial Sequence
  source: /note="Description of Artificial Sequence: Synthetic polynucleotide"
caggtgcagctggtggagtctgggggaggcgtggtccagcctgggaggtccctgagactctcctgtgcagcatctggattcaccttcagtaactatggcatgcactgggtccgccaggctccaggcgaggggctggagtgggtggcagctatatggtttgatgcaagtgataaatactatgcagacgccgtgaagggccgattcaccatctccagagacaactccaagaacacgctgtatctgcaaatgaacagcctgagagccgaggacacggctgtgtattactgtgcgagagatcaggcgatttttggagtggtccccgactactggggccagggaaccctggtcaccgtctcctca

SEQ ID NO: 1799 - DNA, 360 bp, Artificial Sequence
  source: /note="Description of Artificial Sequence: Synthetic polynucleotide"
caggtgcagctggtggagtctgggggaggcgtggtccagcctgggaggtccctgagactctcctgtgcagcatctggattcaccttcagtaactatggcatgcactgggtccgccaggctccaggcgaggggctggagtgggtggcagctatatggtttgatgcaagtgataaatactatgcagactccgtgaagggccgattcaccatctccagagacaactccaagaacacgctgtatctgcaaatgaacagcctgagagccgaggacacggctgtgtattactgtgcgagagatcaggcgatttttggagtggtccccgactactggggccagggaaccctggtcaccgtctcctca

SEQ ID NO: 1800 - DNA, 360 bp, Artificial Sequence
  source: /note="Description of Artificial Sequence: Synthetic polynucleotide"
caggtgcagctggtggagtctgggggaggcgtggtccagcctgggaggtccctgagactctcctgtgcagcatctggattcaccttcagtaactatggcatgcactgggtccgccaggctccaggcgaggggctggagtgggtggcagctatatggtttgatggaagtgataaatactatgcagacgccgtgaagggccgattcaccatctccagagacaactccaagaacacgctgtatctgcaaatgaacagcctgagagccgaggacacggctgtgtattactgtgcgagagatcaggcgatttttggagtggtccccgactactggggccagggaaccctggtcaccgtctcctca

SEQ ID NO: 1801 - DNA, 360 bp, Artificial Sequence; identical to SEQ ID NO: 1798
  source: /note="Description of Artificial Sequence: Synthetic polynucleotide"

SEQ ID NO: 1802 - DNA, 360 bp, Artificial Sequence
  source: /note="Description of Artificial Sequence: Synthetic polynucleotide"
caggtgcagctggtggagtctgggggaggcgtggtccagcctgggaggtccctgagactctcctgtgcagcatctggattcaccttcagtaactatggcatgcactgggtccgccaggctccaggcaaggggctggagtgggtggcagctatatggtttgatgcaagtgataaatactatgcagacgccgtgaagggccgattcaccatctccagagacaactccaagaacacgctgtatctgcaaatgaacagcctgagagccgaggacacggctgtgtattactgtgcgagagatcaggcgatttttggagtggtccccgactactggggccagggaaccctggtcaccgtctcctca

SEQ ID NO: 1803 - DNA, 360 bp, Artificial Sequence; identical to SEQ ID NO: 1802
  source: /note="Description of Artificial Sequence: Synthetic polynucleotide"

SEQ ID NO: 1804 - DNA, 360 bp, Artificial Sequence; identical to SEQ ID NO: 1798
  source: /note="Description of Artificial Sequence: Synthetic polynucleotide"

SEQ ID NO: 1805 - DNA, 360 bp, Artificial Sequence; identical to SEQ ID NO: 1802
  source: /note="Description of Artificial Sequence: Synthetic polynucleotide"

SEQ ID NO: 1806 - DNA, 378 bp, Artificial Sequence
  source: /note="Description of Artificial Sequence: Synthetic polynucleotide"
caggtgcagttgcaggagtcgggcccaggactggtgaagccttcagagaccctgtccctcacctgcactgtctctggtgactccatcagcagtggtggttactactggagctggatccgccagcccccagggaagggcctggagtggattgggtacatctattacagtgggagcacctactacaacccgtccctcaagagtcgagttaccatatcagtagacacgtctaagaaccagttctccctgaagctgagctctgtgactgccgcggacacggccgtgtattactgtgcgagagatcgtattacgatttttggagtggttatggggggcggtatggacgtctggggccaagggaccacggtcaccgtctcctca

SEQ ID NO: 1807 - DNA, 378 bp, Artificial Sequence; identical to SEQ ID NO: 1806
  source: /note="Description of Artificial Sequence: Synthetic polynucleotide"

SEQ ID NO: 1808 - DNA, 378 bp, Artificial Sequence
  source: /note="Description of Artificial Sequence: Synthetic polynucleotide"
caggtgcagttgcaggagtcgggcccaggactggtgaagccttcacagaccctgtccctcacctgcactgtctctggtgactccatcagcagtggtggttactactggagctggatccgccagcccccagggaagggcctggagtggattgggtacatctattacagtgggagcacctactacaacccgtccctcaagagtcgagttaccatatcagtagacacgtctaagaaccagttctccctgaagctgagctctgtgactgccgcggacacggccgtgtattactgtgcgagagatcgtattacgatttttggagtggttatggggggcggtatggacgtctggggccaagggaccacggtcaccgtctcctca

SEQ ID NO: 1809 - DNA, 378 bp, Artificial Sequence
  source: /note="Description of Artificial Sequence: Synthetic polynucleotide"
caggtgcagttgcaggagtcgggcccaggactggtgaagccttcagagaccctgtccctcacctgcactgtctctggtgactccatcagcagtggtggttactactggagctggatccgccagcacccagggaagggcctggagtggattgggtacatctattacagtgggagcacctactacaacccgtccctcaagagtcgagttaccatatcagtagacacgtctaagaaccagttctccctgaagctgagctctgtgactgccgcggacacggccgtgtattactgtgcgagagatcgtattacgatttttggagtggttatggggggcggtatggacgtctggggccaagggaccacggtcaccgtctcctca

SEQ ID NO: 1810 - DNA, 378 bp, Artificial Sequence; identical to SEQ ID NO: 1736
  source: /note="Description of Artificial Sequence: Synthetic polynucleotide"

SEQ ID NO: 1811 - DNA, 378 bp, Artificial Sequence; identical to SEQ ID NO: 1809
  source: /note="Description of Artificial Sequence: Synthetic polynucleotide"

SEQ ID NO: 1812 - DNA, 378 bp, Artificial Sequence; identical to SEQ ID NO: 1808
  source: /note="Description of Artificial Sequence: Synthetic polynucleotide"

SEQ ID NO: 1813 - DNA, 369 bp, Artificial Sequence
  source: /note="Description of Artificial Sequence: Synthetic polynucleotide"
caggtgcagctggtgcagtctggggctgaggtgaagaagcctggggcctcagtgaaggtctcctgcaaggcttctggatacaccttcaccggctactatatccactgggtgcgacaggcccctggacaagggcttgagtggatggggtggatcaaccctgaaagtggtggcacagactattcacagaggtttcagggcagggtcaccatgaccagggacacgtccatcagcacagcctacatggaactgaacaggctgagatctgacgacacggccgtgtattactgtgcgagagaggccacgatttttggaatggttattgtaccgtttgactactggggccagggaaccctggtcaccgtctcctca

SEQ ID NO: 1814 - DNA, 369 bp, Artificial Sequence
  source: /note="Description of Artificial Sequence: Synthetic polynucleotide"
caggtgccgctggtgcagtctggggctgaggtgaagaagcctggggcctcagtgaaggtctcctgcaaggcttctggatacaccttcaccggctactatatccactgggtgcgacaggcccctggacaagggcttgagtggatggggtggatcaaccctgaaagtggtggcacagactattcacagaggtttcagggcaggttcaccatgaccagggacacgtccatcagcacagcctacatggaactgaacaggctgagatctgacgacacggccgtgtattactgtgcgagagaggccacgatttttggaatggttattgtaccgtttgactactggggccagggaaccctggtcaccgtctcctca

SEQ ID NO: 1815 - DNA, 369 bp, Artificial Sequence
  source: /note="Description of Artificial Sequence: Synthetic polynucleotide"
caggtgcagctggtgcagtctggggctgaggtgaagaagcctggggcctcagtgaaggtctcctgcaaggcttctggatacaccttcaccggctactatatccactgggtgcgacaggcccctggacaagggcttgagtggatggggtggatcaaccctgacgctggtggcacagactattcacagaggtttcagggcagggtcaccatgaccagggacacgtccatcagcacagcctacatggaactgaacaggctgagatctgacgacacggccgtgtattactgtgcgagagaggccacgatttttggaatggttattgtaccgtttgactactggggccagggaaccctggtcaccgtctcctca

SEQ ID NO: 1816 - DNA, 369 bp, Artificial Sequence
  source: /note="Description of Artificial Sequence: Synthetic polynucleotide"
caggtgccgctggtgcagtctggggctgaggtgaagaagcctggggcctcagtgaaggtctcctgcaaggcttctggatacaccttcaccggctactatatccactgggtgcgacaggcccctggacaagggcttgagtggatggggtggatcaaccctgacgctggtggcacagactattcacagaggtttcagggcaggttcaccatgaccagggacacgtccatcagcacagcctacatggaactgaacaggctgagatctgacgacacggccgtgtattactgtgcgagagaggccacgatttttggaatggttattgtaccgtttgactactggggccagggaaccctggtcaccgtctcctca

SEQ ID NO: 1817 - DNA, 369 bp, Artificial Sequence
  source: /note="Description of Artificial Sequence: Synthetic polynucleotide"
caggtgcagctggtgcagtctggggctgaggtgaagaagcctggggcctcagtgaaggtctcctgcaaggcttctggatacaccttcaccggctactatatccactgggtgcgacaggcccctggacaagggcttgagtggatggggtggatcaaccctgacagtggtggcacagactattcacagaggtttcagggcagggtcaccatgaccagggacacgtccatcagcacagcctacatggaactgaacaggctgagatctgacgacacggccgtgtattactgtgcgagagaggccacgatttttggaatggttattgtaccgtttgactactggggccagggaaccctggtcaccgtctcctca

SEQ ID NO: 1818 - DNA, 369 bp, Artificial Sequence
  source: /note="Description of Artificial Sequence: Synthetic polynucleotide"
caggtgcagctggtgcagtctggggctgaggtgaagaagcctggggcctcagtgaaggtctcctgcaaggcttctggatacaccttcaccggctactatatccactgggtgcgacaggcccctggacaagggcttgagtggatggggtggatcaaccctgacagtggtggcacagactattcacagaggtttcagggcaggttcaccatgaccagggacacgtccatcagcacagcctacatggaactgaacaggctgagatctgacgacacggccgtgtattactgtgcgagagaggccacgatttttggaatggttattgtaccgtttgactactggggccagggaaccctggtcaccgtctcctca

SEQ ID NO: 1819 - DNA, 369 bp, Artificial Sequence
  source: /note="Description of Artificial Sequence: Synthetic polynucleotide"
caggtgccgctggtgcagtctggggctgaggtgaagaagcctggggcctcagtgaaggtctcctgcaaggcttctggatacaccttcaccggctactatatccactgggtgcgacaggcccctggacaagggcttgagtggatggggtggatcaaccctgacagtggtggcacagactattcacagaggtttcagggcagggtcaccatgaccagggacacgtccatcagcacagcctacatggaactgaacaggctgagatctgacgacacggccgtgtattactgtgcgagagaggccacgatttttggaatggttattgtaccgtttgactactggggccagggaaccctggtcaccgtctcctca

SEQ ID NO: 1820 - DNA, 369 bp, Artificial Sequence
  source: /note="Description of Artificial Sequence: Synthetic polynucleotide"
caggtgcagctggtgcagtctggggctgaggtgaagaagcctggggcctcagtgaaggtctcctgcaaggcttctggatacaccttcaccggctactatatccactgggtgcgacaggcccctggacaagggcttgagtggatggggtggatcaaccctgacgctggtggcacagactattcacagaggtttcagggcaggttcaccatgaccagggacacgtccatcagcacagcctacatggaactgaacaggctgagatctgacgacacggccgtgtattactgtgcgagagaggccacgatttttggaatggttattgtaccgtttgactactggggccagggaaccctggtcaccgtctcctca

SEQ ID NO: 1821 - DNA, 369 bp, Artificial Sequence
  source: /note="Description of Artificial Sequence: Synthetic polynucleotide"
caggtgccgctggtgcagtctggggctgaggtgaagaagcctggggcctcagtgaaggtctcctgcaaggcttctggatacaccttcaccggctactatatccactgggtgcgacaggcccctggacaagggcttgagtggatggggtggatcaaccctgacgctggtggcacagactattcacagaggtttcagggcagggtcaccatgaccagggacacgtccatcagcacagcctacatggaactgaacaggctgagatctgacgacacggccgtgtattactgtgcgagagaggccacgatttttggaatggttattgtaccgtttgactactggggccagggaaccctggtcaccgtctcctca

SEQ ID NO: 1822 - DNA, 369 bp, Artificial Sequence
  source: /note="Description of Artificial Sequence: Synthetic polynucleotide"
caggtgcagctggtgcagtctggggctgaggtgaagaagcctggggcctcagtgaaggtctcctgcaaggcttctggatacaccttcaccggctactatatccactgggtgcgacaggcccctggacaagggcttgagtggatggggtggatcaaccctgacgctggtggcacagactattcacagaggtttcagggcagggtcaccatgaccagggacacgtccatcagcacagcctacatggaactgaacagcctgagatctgacgacacggccgtgtattactgtgcgagagaggccacgatttttggaatggttattgtaccgtttgactactggggccagggaaccctggtcaccgtctcctca

SEQ ID NO: 1823 - DNA, 369 bp, Artificial Sequence
  source: /note="Description of Artificial Sequence: Synthetic polynucleotide"
caggtgcagctggtgcagtctggggctgaggtgaagaagcctggggcctcagtgaaggtctcctgcaaggcttctggatacaccttcaccggctactatatccactgggtgcgacaggcccctggacaagggcttgagtggatggggtggatcaaccctgaaagtggtggcacagactattcacagaggtttcagggcagggtcaccatgaccagggacacgtccatcagcacagcctacatggaactgaacagcctgagatctgacgacacggccgtgtattactgtgcgagagaggccacgatttttggaatggttattgtaccgtttgactactggggccagggaaccctggtcaccgtctcctca

SEQ ID NO: 1824 - DNA, 369 bp, Artificial Sequence
  source: /note="Description of Artificial Sequence: Synthetic polynucleotide"
caggtgccgctggtacagtctggggctgaggtgaagaagcctggggcctcagtgaaggtctcctgcaaggcttctggatacaccttcaccggctactatatacactgggtgcgtcaggcccctggacaagggcttgtgtggatggggtggatcagccctaacagtggtgaaacaagctatgcacagaagtttcaggacagggtcaccatgaccagggacacgtccatcagcacagcctatatggagctgagcagactgagatctgacgacacggccgtgtatttctgtgcgagagaggccacgatttttggaatgcttattgtaccatttgactactggggccagggaaccctggtcaccgtctcctca

SEQ ID NO: 1825 - DNA, 369 bp, Artificial Sequence
  source: /note="Description of Artificial Sequence: Synthetic polynucleotide"
caggtgccgctggtacagtctggggctgaggtgaagaagcctggggcctcagtgaaggtctcctgcaaggcttctggatacaccttcaccggctactatatacactgggtgcgtcaggcccctggacaagggcttgtgtggatggggtggatcagccctaacagtggtgacacaagctatgcacagaagtttcaggacagggtcaccatgaccagggacacgtccatcagcacagcctatatggagctgagcagactgagatctgacgacacggccgtgtatttctgtgcgagagaggccacgatttttggaatgcttattgtaccatttgactactggggccagggaaccctggtcaccgtctcctca

SEQ ID NO: 1826 - DNA, 369 bp, Artificial Sequence; identical to SEQ ID NO: 1824
  source: /note="Description of Artificial Sequence: Synthetic polynucleotide"

SEQ ID NO: 1827 - DNA, 369 bp, Artificial Sequence
  source: /note="Description of Artificial Sequence: Synthetic polynucleotide"
caggtgccgctggtacagtctggggctgaggtgaagaagcctggggcctcagtgaaggtctcctgcaaggcttctggatacaccttcaccggctactatatacactgggtgcgtcaggcccctggacaagggcttgtgtggatggggtggatcagccctaacagtggtgaaacaagctatgcacagaagtttcaggacagggtcaccatgaccagggacacgtccatcagcacagcctatatggagctgagcagactgagatctgacgacacggccgtgtatttctgtacgagagaggccacgatttttggaatgcttattgtaccatttgactactggggccagggaaccctggtcaccgtctcctca

SEQ ID NO: 1828 - DNA, 369 bp, Artificial Sequence; identical to SEQ ID NO: 1734
  source: /note="Description of Artificial Sequence: Synthetic polynucleotide"

SEQ ID NO: 1829 - DNA, 369 bp, Artificial Sequence; identical to SEQ ID NO: 1827
  source: /note="Description of Artificial Sequence: Synthetic polynucleotide"

SEQ ID NO: 1830 - DNA, 369 bp, Artificial Sequence; identical to SEQ ID NO: 1825
  source: /note="Description of Artificial Sequence: Synthetic polynucleotide"

SEQ ID NO: 1831 - DNA, 369 bp, Artificial Sequence
  source: /note="Description of Artificial Sequence: Synthetic polynucleotide"
caggtgcagctggtacagtctggggctgaggtgaagaagcctggggcctcagtgaaggtctcctgcaaggcttctggatacaccttcaccggctactatatacactgggtgcgtcaggcccctggacaagggcttgagtggatggggtggatcagccctaacagtggtgaaacaagctatgcacagaagtttcaggacagggtcaccatgaccagggacacgtccatcagcacagcctatatggagctgagcagcctgagatctgacgacacggccgtgtatttctgtgcgagagaggccacgatttttggaatgcttattgtaccatttgactactggggccagggaaccctggtcaccgtctcctca

SEQ ID NO: 1832 - DNA, 369 bp, Artificial Sequence
  source: /note="Description of Artificial Sequence: Synthetic polynucleotide"
caggtgcagctggtacagtctggggctgaggtgaagaagcctggggcctcagtgaaggtctcctgcaaggcttctggatacaccttcaccggctactatatacactgggtgcgtcaggcccctggacaagggcttgagtggatggggtggatcagccctaacagtggtgaaacaagctatgcacagaagtttcaggacagggtcaccatgaccagggacacgtccatcagcacagcctatatggagctgagcagactgagatctgacgacacggccgtgtatttctgtgcgagagaggccacgatttttggaatgcttattgtaccatttgactactggggccagggaaccctggtcaccgtctcctca

SEQ ID NO: 1833 - DNA, 369 bp, Artificial Sequence
  source: /note="Description of Artificial Sequence: Synthetic polynucleotide"
caggtgccgctggtgcagtctggggctgaggtgaagaagcctggggcctcagtgaaggtctcctgcaaggcttctggatacaccttcaccggctactatatccactgggtgcgacaggcccctggacaaggacttgagtggatggggtggatcaaccctgaaagtggtggcacagactattcacagaggtttcagggcagggtcaccatgaccagggacacgtccatcagcacagcctacatggaactgagcaggctgagatctgacgacacggccgtgtattactgtgcgagagaggccacgatttttggaatggttattgtaccgtttgactactggggccagggaaccctggtcaccgtctcctca

SEQ ID NO: 1834 - DNA, 369 bp, Artificial Sequence
  source: /note="Description of Artificial Sequence: Synthetic polynucleotide"
caggtgccgctggtgcagtctggggctgaggtgaagaagcctggggcctcagtgaaggtctcctgcaaggcttctggatacaccttcaccggctactatatccactgggtgcgacaggcccctggacaaggacttgagtggatggggtggatcaaccctgaaagtggtggcacagactattcacagaggtttcagggcaggttcaccatgaccagggacacgtccatcagcacagcctacatggaactgagcaggctgagatctgacgacacggccgtgtattactgtgcgagagaggccacgatttttggaatggttattgtaccgtttgactactggggccagggaaccctggtcaccgtctcctca

SEQ ID NO: 1835 - DNA, 369 bp, Artificial Sequence
  source: /note="Description of Artificial Sequence: Synthetic polynucleotide"
caggtgccgctggtgcagtctggggctgaggtgaagaagcctggggcctcagtgaaggtctcctgcaaggcttctggatacaccttcaccggctactatatccactgggtgcgacaggcccctggacaaggacttgagtggatggggtggatcaaccctgacagtggtggcacagactattcacagaggtttcagggcagggtcaccatgaccagggacacgtccatcagcacagcctacatggaactgagcaggctgagatctgacgacacggccgtgtattactgtgcgagagaggccacgatttttggaatggttattgtaccgtttgactactggggccagggaaccctggtcaccgtctcctca

SEQ ID NO: 1836 - DNA, 369 bp, Artificial Sequence
  source: /note="Description of Artificial Sequence: Synthetic polynucleotide"
caggtgcagctggtgcagtctggggctgaggtgaagaagcctggggcctcagtgaaggtctcctgcaaggcttctggatacaccttcaccggctactatatccactgggtgcgacaggcccctggacaaggacttgagtggatggggtggatcaaccctgaaagtggtggcacagactattcacagaggtttcagggcagggtcaccatgaccagggacacgtccatcagcacagcctacatggaactgagcagcctgagatctgacgacacggccgtgtattactgtgcgagagaggccacgatttttggaatggttattgtaccgtttgactactggggccagggaaccctggtcaccgtctcctca

SEQ ID NO: 1837 - DNA, 369 bp, Artificial Sequence; identical to SEQ ID NO: 1833
  source: /note="Description of Artificial Sequence: Synthetic polynucleotide"

SEQ ID NO: 1838 - DNA, 369 bp, Artificial Sequence
  source: /note="Description of Artificial Sequence: Synthetic polynucleotide"
caggtgccgctggtgcagtctggggctgaggtgaagaagcctggggcctcagtgaaggtctcctgcaaggcttctggatacaccttcaccggctactatatacactgggtgcgtcaggcccctggacaagggcttgagtggatggggtggataagccctaaccaaggtgaaacaaactatgcacagaagtttcaggacagggtcaccatgaccagggacacgtccatcagcacagcctatatggagctgagcaggctgagatctgacgacacggccgtgtattactgtgcgagagaggccacgatttttggaatgcttattgtaccatttgactactggggccagggaaccctggtcaccgtctcctca

SEQ ID NO: 1839 - DNA, 369 bp, Artificial Sequence
  source: /note="Description of Artificial Sequence: Synthetic polynucleotide"
caggtgccgctggtgcagtctggggctgaggtgaagaagcctggggcctcagtgaaggtctcctgcaaggcttctggatacaccttcaccggctactatatacactgggtgcgtcaggcccctggacaagggcttgagtggatggggtggataagccctaaccaaggtgacacaaactatgcacagaagtttcaggacagggtcaccatgaccagggacacgtccatcagcacagcctatatggagctgagcaggctgagatctgacgacacggccgtgtattactgtgcgagagaggccacgatttttggaatgcttattgtaccatttgactactggggccagggaaccctggtcaccgtctcctca

SEQ ID NO: 1840 - DNA, 369 bp, Artificial Sequence
  source: /note="Description of Artificial Sequence: Synthetic polynucleotide"
caggtgccgctggtgcagtctggggctgaggtgaagaagcctggggcctcagtgaaggtctcctgcaaggcttctggatacaccttcaccggctactatatacactgggtgcgtcaggcccctggacaagggcttgagtggatggggtggataagccctaaccaaggtgaaacaaactatgcacagaagtttcaggacagggtcaccatgaccagggacacgtccatcagcacagcctatatggagctgagcaggctgagatctgacgacacggccgtgtattactgtacgagagaggccacgatttttggaatgcttattgtaccatttgactactggggccagggaaccctggtcaccgtctcctca

SEQ ID NO: 1841 - DNA, 369 bp, Artificial Sequence
  source: /note="Description of Artificial Sequence: Synthetic polynucleotide"
caggtgccgctggtgcagtctggggctgaggtgaagaagcctggggcctcagtgaaggtctcctgcaaggcttctggatacaccttcaccggctactatatacactgggtgcgtcaggcccctggacaagggcttgagtggatggggtggataagccctaacaatggtgaaacaaactatgcacagaagtttcaggacagggtcaccatgaccagggacacgtccatcagcacagcctatatggagctgagcaggctgagatctgacgacacggccgtgtattactgtgcgagagaggccacgatttttggaatgcttattgtaccatttgactactggggccagggaaccctggtcaccgtctcctca

SEQ ID NO: 1842 - DNA, 369 bp, Artificial Sequence
  source: /note="Description of Artificial Sequence: Synthetic polynucleotide"
caggtgccgctggtgcagtctggggctgaggtgaagaagcctggggcctcagtgaaggtctcctgcaaggcttctggatacaccttcaccggctactatatacactgggtgcgtcaggcccctggacaagggcttgagtggatggggtggataagccctaacaatggtgacacaaactatgcacagaagtttcaggacagggtcaccatgaccagggacacgtccatcagcacagcctatatggagctgagcaggctgagatctgacgacacggccgtgtattactgtgcgagagaggccacgatttttggaatgcttattgtaccatttgactactggggccagggaaccctggtcaccgtctcctca

SEQ ID NO: 1843 - DNA, 369 bp, Artificial Sequence
  source: /note="Description of Artificial Sequence: Synthetic polynucleotide"
caggtgccgctggtgcagtctggggctgaggtgaagaagcctggggcctcagtgaaggtctcctgcaaggcttctggatacaccttcaccggctactatatacactgggtgcgtcaggcccctggacaagggcttgagtggatggggtggataagccctaaccaaggtgacacaaactatgcacagaagtttcaggacagggtcaccatgaccagggacacgtccatcagcacagcctatatggagctgagcaggctgagatctgacgacacggccgtgtattactgtacgagagaggccacgatttttggaatgcttattgtaccatttgactactggggccagggaaccctggtcaccgtctcctca

SEQ ID NO: 1844 - DNA, 369 bp, Artificial Sequence
  source: /note="Description of Artificial Sequence: Synthetic polynucleotide"
caggtgccgctggtgcagtctggggctgaggtgaagaagcctggggcctcagtgaaggtctcctgcaaggcttctggatacaccttcaccggctactatatacactgggtgcgtcaggcccctggacaagggcttgagtggatggggtggataagccctaacaatggtgaaacaaactatgcacagaagtttcaggacagggtcaccatgaccagggacacgtccatcagcacagcctatatggagctgagcaggctgagatctgacgacacggccgtgtattactgtacgagagaggccacgatttttggaatgcttattgtaccatttgactactggggccagggaaccctggtcaccgtctcctca

SEQ ID NO: 1845 - DNA, 369 bp, Artificial Sequence; identical to SEQ ID NO: 1838
  source: /note="Description of Artificial Sequence: Synthetic polynucleotide"

SEQ ID NO: 1846 - DNA, 369 bp, Artificial Sequence; identical to SEQ ID NO: 1842
  source: /note="Description of Artificial Sequence: Synthetic polynucleotide"

SEQ ID NO: 1847 - DNA, 369 bp, Artificial Sequence; identical to SEQ ID NO: 1839
  source: /note="Description of Artificial Sequence: Synthetic polynucleotide"

SEQ ID NO: 1848 - DNA, 369 bp, Artificial Sequence; identical to SEQ ID NO: 1841
  source: /note="Description of Artificial Sequence: Synthetic polynucleotide"

SEQ ID NO: 1849 - DNA, 369 bp, Artificial Sequence
  source: /note="Description of Artificial Sequence: Synthetic polynucleotide"
caggtgcagctggtgcagtctggggctgaggtgaagaagcctggggcctcagtgaaggtctcctgcaaggcttctggatacaccttcaccggctactatatacactgggtgcgtcaggcccctggacaagggcttgagtggatggggtggataagccctaaccaaggtgaaacaaactatgcacagaagtttcaggacagggtcaccatgaccagggacacgtccatcagcacagcctatatggagctgagcagcctgagatctgacgacacggccgtgtattactgtgcgagagaggccacgatttttggaatgcttattgtaccatttgactactggggccagggaaccctggtcaccgtctcctca

SEQ ID NO: 1850 - DNA, 369 bp, Artificial Sequence; identical to SEQ ID NO: 1849
  source: /note="Description of Artificial Sequence: Synthetic polynucleotide"

SEQ ID NO: 1851 - DNA, 384 bp, Artificial Sequence; identical to SEQ ID NO: 1728
  source: /note="Description of Artificial Sequence: Synthetic polynucleotide"

SEQ ID NO: 1852 - DNA, 384 bp, Artificial Sequence; identical to SEQ ID NO: 1728
  source: /note="Description of Artificial Sequence: Synthetic polynucleotide"

SEQ ID NO: 1853 - DNA, 384 bp, Artificial Sequence; identical to SEQ ID NO: 1728
  source: /note="Description of Artificial Sequence: Synthetic polynucleotide"

SEQ ID NO: 1854 - DNA, 384 bp, Artificial Sequence; identical to SEQ ID NO: 1728
  source: /note="Description of Artificial Sequence: Synthetic polynucleotide"

SEQ ID NO: 1855 - DNA, 384 bp, Artificial Sequence; identical to SEQ ID NO: 1728
  source: /note="Description of Artificial Sequence: Synthetic polynucleotide"

SEQ ID NO: 1856 - DNA, 384 bp, Artificial Sequence; identical to SEQ ID NO: 1728
  source: /note="Description of Artificial Sequence: Synthetic polynucleotide"

SEQ ID NO: 1857 - DNA, 384 bp, Artificial Sequence; identical to SEQ ID NO: 1728
  source: /note="Description of Artificial Sequence: Synthetic polynucleotide"

SEQ ID NO: 1858 - DNA, 384 bp, Artificial Sequence; identical to SEQ ID NO: 1728
  source: /note="Description of Artificial Sequence: Synthetic polynucleotide"

SEQ ID NO: 1859 - DNA, 384 bp, Artificial Sequence; identical to SEQ ID NO: 1728
  source: /note="Description of Artificial Sequence: Synthetic polynucleotide"

SEQ ID NO: 1860 - DNA, 384 bp, Artificial Sequence; identical to SEQ ID NO: 1728
  source: /note="Description of Artificial Sequence: Synthetic polynucleotide"

SEQ ID NO: 1861 - DNA, 384 bp, Artificial Sequence; identical to SEQ ID NO: 1728
  source: /note="Description of Artificial Sequence: Synthetic polynucleotide"

SEQ ID NO: 1862 - DNA, 384 bp, Artificial Sequence; identical to SEQ ID NO: 1728
  source: /note="Description of Artificial Sequence: Synthetic polynucleotide"

SEQ ID NO: 1863 - DNA, 384 bp, Artificial Sequence
  source: /note="Description of Artificial Sequence: Synthetic polynucleotide"
cagatgcaggtggtgcagtctggggctgaggtgaagaagcctggggcctcagtgaaggtctcctgcaaggcttccggatacaccttcaccggctactatatgcattgggtgcgacaggcccctggacaagggcttgagtggatgggatggatcaaccctaacagtggtggcacaaactatgcacagaagtttcagggcagggtcaccatgaccagggacacgtccatcagtacagcctacatggagctgagcagcctgaggtctgacgacacggccgtgtattactgtgcgagagggggggattacgttttcgggacttatcggcctcactactactacggtatggacgtctggggccaagggaccacggtcaccgtctcctca

SEQ ID NO: 1864 - DNA, 384 bp, Artificial Sequence
  source: /note="Description of Artificial Sequence: Synthetic polynucleotide"
cagatgcaggtggtgcagtctggggctgaggtgaagaagcctggggcctcagtgaaggtctcctgcaaggcttccggatacaccttcaccggctactatatgcattgggtgcgacaggcccctggacaagggcttgagtggatgggatggatcaaccctaacagtggtggcacaaactatgcacagaagtttcagggcagggtcaccatgaccagggacacgtccatcagtacagcctacatggagctgagcaggctgaggtctgacgacacggccgtgtattactgtgcgagagggggggattacgttttcgggacttatcggcctcactactactacggtatggacgtctggggccaagggaccacggtcaccgtctcctca

SEQ ID NO: 1865 - DNA, 363 bp, Artificial Sequence; identical to SEQ ID NO: 1765
  source: /note="Description of Artificial Sequence: Synthetic polynucleotide"

SEQ ID NO: 1866 - DNA, 363 bp, Artificial Sequence; identical to SEQ ID NO: 1747
  source: /note="Description of Artificial Sequence: Synthetic polynucleotide"

SEQ ID NO: 1867 - DNA, 384 bp, Artificial Sequence; identical to SEQ ID NO: 1728
  source: /note="Description of Artificial Sequence: Synthetic polynucleotide"

SEQ ID NO: 1868 - DNA, 363 bp, Artificial Sequence
  source: /note="Description of Artificial Sequence: Synthetic polynucleotide"
caggtgcagttggtggagtctgggggaggcgtggtccagcctgggaggtccctgagactctcctgtacagcgtctggattcaccttcagtagctatggcatacactgggtccgccaggctccaggcaaggggctggagtgggtggcagttatatggtatgatggaagtaataagttccatgcagactccgtgaagggccgattcaccatctccagagacaattccaagaacacgctgtatctgcaaatgaacagcctgagagccgaggactcggctatgtacttctgtgcgagaggaaaagtggctggtatgcctgaagcttttgaaatctggggccaagggacaaaggtcaccgtctcttca

SEQ ID NO: 1869 - DNA, 387 bp, Artificial Sequence
  source: /note="Description of Artificial Sequence: Synthetic polynucleotide"
caaatgcagctggtgcagtctggggctgaggtgaagaagcctggggcctcagtgaaggtctcctgcaaggcttctggatacaccttcaccagttatgatatcaactgggtgcgacaggccactggacaagggcttgagtggatgggatggatgaaccctaacagtggtaacacaggctatgcacagaagttccagggcagagtcaccatgaccagggacacctccataagcacagcctacatggagctgagcagcctgagatctcaggacacggccgtgtattactgtgcgagagggggtgattacgtttgggggagttatcgtccctactactactactacggtatggacgtctggggccaagggaccacggtcaccgtctcctca

SEQ ID NO: 1870 - DNA, 363 bp, Artificial Sequence
  source: /note="Description of Artificial Sequence: Synthetic polynucleotide"
caggtgcagttggtggagtctgggggaggcgtggtccagcctgggaggtccctgagactctcctgtgcagcgtctggattcaccttcagtagctatggcatacactgggtccgccaggctccaggcaaggggctggagtgggtggcagttatatggtatgatgcaagtaataagttccatgcagacgccgtgaagggccgattcaccatctccagagacaattccaagaacacgctgtatctgcaaatgaacagcctgagagccgaggactcggctatgtacttctgtgcgagaggaaaagtggctggtatgcctgaagcttttgaaatctggggccaagggacaaaggtcaccgtctcttca

SEQ ID NO: 1871 - DNA, 363 bp, Artificial Sequence
  source: /note="Description of Artificial Sequence: Synthetic polynucleotide"
caggtgcagttggtggagtctgggggaggcgtggtccagcctgggaggtccctgagactctcctgtacagcgtctggattcaccttcagtagctatggcatacactgggtccgccaggctccaggcaaggggctggagtgggtggcagttatatggtatgatgcaagtaataagttccatgcagacgccgtgaagggccgattcaccatctccagagacaattccaagaacacgctgtatctgcaaatgaacagcctgagagccgaggactcggctatgtacttctgtgcgagaggaaaagtggctggtatgcctgaagcttttgaaatctggggccaagggacaaaggtcaccgtctcttca

SEQ ID NO: 1872 - DNA, 363 bp, Artificial Sequence; identical to SEQ ID NO: 1870
  source: /note="Description of Artificial Sequence: Synthetic polynucleotide"

SEQ ID NO: 1873 - DNA, 363 bp, Artificial Sequence
  source: /note="Description of Artificial Sequence: Synthetic polynucleotide"
caggtgcagttggtggagtctgggggaggcgtggtccagcctgggaggtccctgagactctcctgtgcagcgtctggattcaccttcagtagctatggcatacactgggtccgccaggctccaggcaaggggctggagtgggtggcagttatatggtatgatgcaagtaataagttccatgcagacgccgtgaagggccgattcaccatctccagagacaattccaagaacacgctgtatctgcaaatgaacagcctgagagccgaggactcggctatgtacttctgtgcgagaggaaaagtggctggtatgcctgaagcttttgaaatctggggccaagggacattggtcaccgtctcttca

SEQ ID NO: 1874 - DNA, 363 bp, Artificial Sequence
  source: /note="Description of Artificial Sequence: Synthetic polynucleotide"
caggtgcagttggtggagtctgggggaggcgtggtccagcctgggaggtccctgagactctcctgtgcagcgtctggattcaccttcagtagctatggcatacactgggtccgccaggctccaggcaaggggctggagtgggtggcagttatatggtatgatgcaagtaataagttccatgcagactccgtgaagggccgattcaccatctccagagacaattccaagaacacgctgtatctgcaaatgaacagcctgagagccgaggactcggctatgtacttctgtgcgagaggaaaagtggctggtatgcctgaagcttttgaaatctggggccaagggacaaaggtcaccgtctcttca

SEQ ID NO: 1875 - DNA, 363 bp, Artificial Sequence
  source: /note="Description of Artificial Sequence: Synthetic polynucleotide"
caggtgcagttggtggagtctgggggaggcgtggtccagcctgggaggtccctgagactctcctgtgcagcgtctggattcaccttcagtagctatggcatacactgggtccgccaggctccaggcaaggggctggagtgggtggcagttatatggtatgatggaagtaataagttccatgcagacgccgtgaagggccgattcaccatctccagagacaattccaagaacacgctgtatctgcaaatgaacagcctgagagccgaggactcggctatgtacttctgtgcgagaggaaaagtggctggtatgcctgaagcttttgaaatctggggccaagggacaaaggtcaccgtctcttca

SEQ ID NO: 1876 - DNA, 387 bp, Artificial Sequence
  source: /note="Description of Artificial Sequence: Synthetic polynucleotide"
caaatgcagctggtgcagtctggggctgaggtgaagaagcctggggcctcagtgaaggtctcctgcaaggcttctggatacaccttcaccagttatgatatcaactgggtgcgacaggccactggacaagggcttgagtggatgggatggatgaaccctaacagtggtggcacaggctatgcacagaagttccagggcagagtcaccatgaccagggacacctccataagcacagcctacatggagctgagcagcctgagatctcaggacacggccgtgtattactgtgcgagagggggtgattacgtttgggggagttatcgtccctactactactactacggtatggacgtctggggccaagggaccacggtcaccgtctcctca

SEQ ID NO: 1877 - DNA, 387 bp, Artificial Sequence; identical to SEQ ID NO: 1869
  source: /note="Description of Artificial Sequence: Synthetic polynucleotide"

SEQ ID NO: 1878 - DNA, 387 bp, Artificial Sequence; identical to SEQ ID NO: 1876
  source: /note="Description of Artificial Sequence: Synthetic polynucleotide"

SEQ ID NO: 1879 - DNA, 387 bp, Artificial Sequence
  source: /note="Description of Artificial Sequence: Synthetic polynucleotide"
caaatgcagctggtgcagtctggggctgaggtgaagaagcctggggcctcagtgaaggtctcctgcaaggcttctggatacaccttcaccagttatgatatcaactgggtgcgacaggcccctggacaagggcttgagtggatgggatggatgaaccctaacagtggtggcacaggctatgcacagaagttccagggcagagtcaccatgaccagggacacctccataagcacagcctacatggagctgagcagcctgagatctgacgacacggccgtgtattactgtgcgagagggggtgattacgtttgggggagttatcgtccctactactactactacggtatggacgtctggggccaagggaccacggtcaccgtctcctca

SEQ ID NO: 1880 - DNA, 387 bp, Artificial Sequence; identical to SEQ ID NO: 1876
  source: /note="Description of Artificial Sequence: Synthetic polynucleotide"

SEQ ID NO: 1881 - DNA, 387 bp, Artificial Sequence
  source: /note="Description of Artificial Sequence: Synthetic polynucleotide"
caaatgcagctggtgcagtctggggctgaggtgaagaagcctggggcctcagtgaaggtctcctgcaaggcttctggatacaccttcaccagttatgatatcaactgggtgcgacaggcccctggacaagggcttgagtggatgggatggatgaaccctaacagtggtaacacaggctatgcacagaagttccagggcagagtcaccatgaccagggacacctccataagcacagcctacatggagctgagcagcctgagatctgacgacacggccgtgtattactgtgcgagagggggtgattacgtttgggggagttatcgtccctactactactactacggtatggacgtctggggccaagggaccacggtcaccgtctcctca

SEQ ID NO: 1882 - DNA, 387 bp, Artificial Sequence
  source: /note="Description of Artificial Sequence: Synthetic polynucleotide"
caaatgcagctggtgcagtctggggctgaggtgaagaagcctggggcctcagtgaaggtctcctgcaaggcttctggatacaccttcaccagttatgatatcaactgggtgcgacaggccactggacaagggcttgagtggatgggatggatgaaccctaacagtggtggcacaggctatgcacagaagttccagggcagagtcaccatgaccagggacacctccataagcacagcctacatggagctgagcagcctgagatctcaggacacggccgtgtattactgtgcgagagggggtgattacgttttcgggagttatcgtccctactactactactacggtatggacgtctggggccaagggaccacggtcaccgtctcctca

SEQ ID NO: 1883 - DNA, 387 bp, Artificial Sequence
  source: /note="Description of Artificial Sequence: Synthetic polynucleotide"
caaatgcagctggtgcagtctggggctgaggtgaagaagcctggggcctcagtgaaggtctcctgcaaggcttctggatacaccttcaccagttatgatatcaactgggtgcgacaggcccctggacaagggcttgagtggatgggatggatgaaccctaacagtggtggcacaggctatgcacagaagttccagggcagagtcaccatgaccagggacacctccataagcacagcctacatggagctgagcagcctgagatctgacgacacggccgtgtattactgtgcgagagggggtgattacgttttcgggagttatcgtccctactactactactacggtatggacgtctggggccaagggaccacggtcaccgtctcctca

SEQ ID NO: 1884 - DNA, 363 bp, Artificial Sequence; identical to SEQ ID NO: 1873
  source: /note="Description of Artificial Sequence: Synthetic polynucleotide"

SEQ ID NO: 1885 - DNA, 648 bp, Artificial Sequence
  source: /note="Description of Artificial Sequence: Synthetic polynucleotide"
cagtctgtgctgactcagccaccctcagcgtctgggacccccgggcagagggtcaccatctcttgttctggaagtagctccaacatcggaagtaatactgtaaactggtaccagcacctcccaggaacggcccccaaactcctcatctatactaataatcagcggccctcaggggtccctgaccgattctctggctccaagtctggcacctcagcctcccttgccatcagtgggctccagtctgaggatgaggctgattatttctgtgcaacattcgatgacagcctgaatggtccggtattcggcggagggaccaagctgaccgtcctaggtcagcccaaggctgccccctcggtcactctgttcccgccctcctctgaggagcttcaagccaacaaggccacactggtgtgtctcataagtgacttctacccgggagccgtgacagtggcctggaaggcagatagcagccccgtcaaggcgggagtggagaccaccacaccctccaaacaaagcaacaacaagtacgcggccagcagctatctgagcctgacgcctgagcagtggaagtcccacagaagctacagctgccaggtcacgcatgaagggagcaccgtggagaagacagtggcccctacagaatgttca

SEQ ID NO: 1886 - DNA, 642 bp, Artificial Sequence
  source: /note="Description of Artificial Sequence: Synthetic polynucleotide"
gacatccagatgacccagtctccatcctccctgtctgcatctataggagacagagtcaccatcacttgccgggcaagtcaggacattagagattatttaggctggtatcagcagaaaccagggaaagcccctaagcgcctgatctatggtgcatccagtttgcaaagtggggtcccttcaaggttcagcggcagtggatctgggacagaattcactctcacaatcagcagcctgcagcctgaagatttcgcaacttattactgtctacagcataataattaccccttcactttcggccctgggaccaaagtggatatcaaacgaacggtggctgcaccatctgtcttcatcttcccgccatctgatgagcagttgaaatctggaactgcctctgttgtgtgcctgctgaataacttctatcccagagaggccaaagtacagtggaaggtggataacgccctccaatcgggtaactcccaggagagtgtcacagagcaggacagcaaggacagcacctacagcctcagcagcaccctgacgctgagcaaagcagactacgagaaacacaaagtctacgcctgcgaagtcacccatcagggcctgagctcgcccgtcacaaagagcttcaacaggggagagtgt

SEQ ID NO: 1887 - DNA, 642 bp, Artificial Sequence; identical to SEQ ID NO: 1886
  source: /note="Description of Artificial Sequence: Synthetic polynucleotide"

SEQ ID NO: 1888 - DNA, 639 bp, Artificial Sequence
  source: /note="Description of Artificial Sequence: Synthetic polynucleotide"
gacatccagatgacccagtctccatcctccctgtctgcatctgtaggagacagagtcaccatcacttgccaggcgagtcaggacattagcaactatttaaattggtatcagcagaaaccagggaaagcccctaagctcctgatctacgatgcatccaatttggaaacaggggtcccatcaaggttcagtggaagtggatctgggacagattttagtttcaccatcagcagcctgcagcctgaagatattgcaacatattactgtcaacagtatgatattctcctcactttcggcggagggaccaaggtggagatcaagcgaacggtggctgcaccatctgtcttcatcttcccgccatctgatgagcagttgaaatctggaactgcctctgttgtgtgcctgctgaataacttctatcccagagaggccaaagtacagtggaaggtggataacgccctccaatcgggtaactcccaggagagtgtcacagagcaggacagcaaggacagcacctacagcctcagcagcaccctgacgctgagcaaagcagactacgagaaacacaaagtctacgcctgcgaagtcacccatcagggcctgagctcgcccgtcacaaagagcttcaacaggggagagtgt

SEQ ID NO: 1889 - DNA, 660 bp, Artificial Sequence
  source: /note="Description of Artificial Sequence: Synthetic polynucleotide"
gacatcgtgatgacccagtctccagactccctggctgtgtctctgggcgagagggccaccatcaactgcaagtccagccagagtgttttatccagctccaacaataagaactacatagcttggtaccagcagcaaccaggacatcctcctaagctgctcatttactgggcatctacccgggaatccggggtccctgaccgattcagtggcagcgggtctgggacagatttcactctcaccatcagcagcctgcaggctgaagatgtggcagttttttactgtcaacaatattatagtactccgtggacgttcggccaagggaccaaggtggaaatcaaacgaacggtggctgcaccatctgtcttcatcttcccgccatctgatgagcagttgaaatctggaactgcctctgttgtgtgcctgctgaataacttctatcccagagaggccaaagtacagtggaaggtggataacgccctccaatcgggtaactcccaggagagtgtcacagagcaggacagcaaggacagcacctacagcctcagcagcaccctgacgctgagcaaagcagactacgagaaacacaaagtctacgcctgcgaagtcacccatcagggcctgagctcgcccgtcacaaagagcttcaacaggggagagtgt

SEQ ID NO: 1890 - DNA, 660 bp, Artificial Sequence
  source: /note="Description of Artificial Sequence: Synthetic polynucleotide"
gacatcgtgatgacccagtctccagactccctggctgtgtctctgggcgagagggccaccatcaactgcaagtccagccagagtgttttatccagctccaacaataagaactacatagcttggtaccagcagaaaccaggacatcctcctaagctgctcatttactgggcatctacccgggaatccggggtccctgaccgattcagtggcagcgggtctgggacagatttcactctcaccatcagcagcctgcaggctgaagatgtggcagttttttactgtcaacaatattatagtactccgtggacgttcggccaagggaccaaggtggaaatcaaacgaacggtggctgcaccatctgtcttcatcttcccgccatctgatgagcagttgaaatctggaactgcctctgttgtgtgcctgctgaataacttctatcccagagaggccaaagtacagtggaaggtggataacgccctccaatcgggtaactcccaggagagtgtcacagagcaggacagcaaggacagcacctacagcctcagcagcaccctgacgctgagcaaagcagactacgagaaacacaaagtctacgcctgcgaagtcacccatcagggcctgagctcgcccgtcacaaagagcttcaacaggggagagtgt

SEQ ID NO: 1891 - DNA, 660 bp, Artificial Sequence
  source: /note="Description of Artificial Sequence: Synthetic polynucleotide"
gacatcgtgatgacccagtctccagactccctgtctgtgtctctgggcgagagggccaccatcaactgcaagtccagccagagtgttttatccagctccaacaataagaactacttagcttggtaccaacagaaaccaggacagcctcctaacctgctcatttactggacttctacccgagattccggggtccctgaccgattcagtggcagcgggtctgggacagatttcactctcaccatcaacagcctgcaggctgaagatgtggctgtttattactgtcagcaatattatcgtactccgtggacgttcggccaagggaccaaggtggaaatcaaacgaacggtggctgcaccatctgtcttcatcttcccgccatctgatgagcagttgaaatctggaactgcctctgttgtgtgcctgctgaataacttctatcccagagaggccaaagtacagtggaaggtggataacgccctccaatcgggtaactcccaggagagtgtcacagagcaggacagcaaggacagcacctacagcctcagcagcaccctgacgctgagcaaagcagactacgagaaacacaaagtctacgcctgcgaagtcacccatcagggcctgagctcgcccgtcacaaagagcttcaacaggggagagtgt

SEQ ID NO: 1892 - DNA, 660 bp, Artificial Sequence
  source: /note="Description of Artificial Sequence: Synthetic polynucleotide"
gacatcgtgatgacccagtctccagactccctgtctgtgtctctgggcgagagggccaccatcaactgcaagtccagccagagtgttttatccagctccaacaataagaactacttagcttggtaccagcagaaaccaggacagcctcctaacctgctcatttactggacttctacccgagattccggggtccctgaccgattcagtggcagcgggtctgggacagatttcactctcaccatcaacagcctgcaggctgaagatgtggctgtttattactgtcagcaatattatcgtactccgtggacgttcggccaagggaccaaggtggaaatcaaacgaacggtggctgcaccatctgtcttcatcttcccgccatctgatgagcagttgaaatctggaactgcctctgttgtgtgcctgctgaataacttctatcccagagaggccaaagtacagtggaaggtggataacgccctccaatcgggtaactcccaggagagtgtcacagagcaggacagcaaggacagcacctacagcctcagcagcaccctgacgctgagcaaagcagactacgagaaacacaaagtctacgcctgcgaagtcacccatcagggcctgagctcgcccgtcacaaagagcttcaacaggggagagtgt

SEQ ID NO: 1893 - DNA, 645 bp, Artificial Sequence
  source: /note="Description of Artificial Sequence: Synthetic polynucleotide"
gaaattgtgttgacgcagtctccaggcaccctgtctttgtctccaggggaaagagccaccctctcctgcagggccagtcagagtattagttacagttacttagcctggtaccagcagaaacctggccaggctccccggctcctcatctatggtgcatccagcagggccactggcatcccagacaggttcagtggcagtgggtctgggacagacttcactctcaccatcagcagacaggagcctgatgattttgcagtgtattactgtcagcagtatggtagttcaccgctcactttcggcggagggaccaaggtggagatcaaacgaacggtggctgcaccatctgtcttcatcttcccgccatctgatgagcagttgaaatctggaactgcctctgttgtgtgcctgctgaataacttctatcccagagaggccaaagtacagtggaaggtggataacgccctccaatcgggtaactcccaggagagtgtcacagagcaggacagcaaggacagcacctacagcctcagcagcaccctgacgctgagcaaagcagactacgagaaacacaaagtctacgcctgcgaagtcacccatcagggcctgagctcgcccgtcacaaagagcttcaacaggggagagtgt

SEQ ID NO: 1894 - DNA, 642 bp, Artificial Sequence
  source: /note="Description of Artificial Sequence: Synthetic polynucleotide"
gaaatagtgatgacgcagtctccagccaccctgtctgtgtctccaggggaaagagccaccctctcctgcagggccagtcagagtgttagcagcaacttagcctggtaccagcagaaacctggccaggctcccaggctcctcatctatggtgcagccaccagggccactggtatcccagccagggtcagtggcagtgggtctgggacagagttcactctcaccatcagcagcctgcagtctgaagattttgcagtttattactgtcagcagtataataactggcctctcactttcggcggagggaccaaggtggagatcaaacgaacggtggctgcaccatctgtcttcatcttcccgccatctgatgagcagttgaaatctggaactgcctctgttgtgtgcctgctgaataacttctatcccagagaggccaaagtacagtggaaggtggataacgccctccaatcgggtaactcccaggagagtgtcacagagcaggacagcaaggacagcacctacagcctcagcagcaccctgacgctgagcaaagcagactacgagaaacacaaagtctacgcctgcgaagtcacccatcagggcctgagctcgcccgtcacaaagagcttcaacaggggagagtgt

SEQ ID NO: 1895 - DNA, 642 bp, Artificial Sequence
  source: /note="Description of Artificial Sequence: Synthetic polynucleotide"
gacattcagatgacccagtctccatcctccctgtctgcatctgtaggagacagagtcaccatcacttgccgggcaagtcagggcattagaaatgagttaggctggtatcagcagaaaccagggaaagcccctaaacgcctgatctatggtgcatccagtttgcaaagtggggtcccatcaaggttcagcggcagtggatctgggacagagttcactctcacaatcagcagcctgcagcctgaagattttgtaacttattactgtctacagcataatagttacccattcactttcggccctgggaccaaagtggatgtcaaacgaacggtggctgcaccatctgtcttcatcttcccgccatctgatgagcagttgaaatctggaactgcctctgttgtgtgcctgctgaataacttctatcccagagaggccaaagtacagtggaaggtggataacgccctccaatcgggtaactcccaggagagtgtcacagagcaggacagcaaggacagcacctacagcctcagcagcaccctgacgctgagcaaagcagactacgagaaacacaaagtctacgcctgcgaagtcacccatcagggcctgagctcgcccgtcacaaagagcttcaacaggggagagtgt

SEQ ID NO: 1896 - DNA, 639 bp, Artificial Sequence
  source: /note="Description of Artificial Sequence: Synthetic polynucleotide"
gacatccagatgacccagtctccatcctccctgtctgcatctgtgggggacagagtcaccatcacttgccaggcgagtcaggacattaccaactatttaaattggtatcagcagaaaccagggaaagcccctaaactcctgatctacgatgcttccaatttggagccaggggtcccatcaaggttcagtggaagtggatctgggacagattttactttcaccatcagcagcctgcagcctgaagatattgcaacatattactgtcaacagtatgatgatctattcactttcggccctgggaccaaagtggatatcaaacgaacggtggctgcaccatctgtcttcatcttcccgccatctgatgagcagttgaaatctggaactgcctctgttgtgtgcctgctgaataacttctatcccagagaggccaaagtacagtggaaggtggataacgccctccaatcgggtaactcccaggagagtgtcacagagcaggacagcaaggacagcacctacagcctcagcagcaccctgacgctgagcaaagcagactacgagaaacacaaagtctacgcctgcgaagtcacccatcagggcctgagctcgcccgtcacaaagagcttcaacaggggagagtgt

SEQ ID NO: 1897 - DNA, 642 bp, Artificial Sequence
  source: /note="Description of Artificial Sequence: Synthetic polynucleotide"
gacatccagatgacccagtctccatcttccgtgtctgcatctgtaggagacagagtcaccatcacttgtcgggcgagtcagggtcttatcatctggttagcctggtatcagcagaaaccggggaaagcccctaaactcctgatctatgctgcatccagtttgcaaagtggggtcccatcaaggttcagcggcagtggctctgggacagatttcactctcaccatcagcagcctacagcctgaagattttgcaacttactattgtcaacagactaacagtttccctccgacgttcggccaagggaccaaggtggaaatcaaacgaacggtggctgcaccatctgtcttcatcttcccgccatctgatgagcagttgaaatctggaactgcctctgttgtgtgcctgctgaataacttctatcccagagaggccaaagtacagtggaaggtggataacgccctccaatcgggtaactcccaggagagtgtcacagagcaggacagcaaggacagcacctacagcctcagcagcaccctgacgctgagcaaagcagactacgagaaacacaaagtctacgcctgcgaagtcacccatcagggcctgagctcgcccgtcacaaagagcttcaacaggggagagtgt

SEQ ID NO: 1898 - DNA, 642 bp, Artificial Sequence; identical to SEQ ID NO: 1897
  source: /note="Description of Artificial Sequence: Synthetic polynucleotide"

SEQ ID NO: 1899 - DNA, 642 bp, Artificial Sequence
  source: /note="Description of Artificial Sequence: Synthetic polynucleotide"
gacattcagatgacccagtctccatcctccctgtctgcatctgtaggagacagagtcaccatcacttgccgggcaagtcagggcattagaaatgagttaggctggtatcagcagaaaccagggaaagcccctaaactcctgatctatggtgcatccagtttgcaaagtggggtcccatcaaggttcagcggcagtggatctgggacagagttcactctcacaatcagcagcctgcagcctgaagattttgtaacttattactgtctacagcataatagttacccattcactttcggccaagggaccaaagtggatgtcaaacgaacggtggctgcaccatctgtcttcatcttcccgccatctgatgagcagttgaaatctggaactgcctctgttgtgtgcctgctgaataacttctatcccagagaggccaaagtacagtggaaggtggataacgccctccaatcgggtaactcccaggagagtgtcacagagcaggacagcaaggacagcacctacagcctcagcagcaccctgacgctgagcaaagcagactacgagaaacacaaagtctacgcctgcgaagtcacccatcagggcctgagctcgcccgtcacaaagagcttcaacaggggagagtgt

SEQ ID NO: 1900 - DNA, 642 bp, Artificial Sequence; identical to SEQ ID NO: 1899
  source: /note="Description of Artificial Sequence: Synthetic polynucleotide"

SEQ ID NO: 1901 - DNA, 642 bp, Artificial Sequence; identical to SEQ ID NO: 1899
  source: /note="Description of Artificial Sequence: Synthetic polynucleotide"

SEQ ID NO: 1902 - DNA, 642 bp, Artificial Sequence
  source: /note="Description of Artificial Sequence: Synthetic polynucleotide"
gacattcagatgacccagtctccatcctccctgtctgcatctgtaggagacagagtcaccatcacttgccgggcaagtcagggcattagaaatgagttaggctggtatcagcagaaaccagggaaagcccctaaactcctgatctatggtgcatccagtttgcaaagtggggtcccatcaaggttcagcggcagtggatctgggacagagttcactctcacaatcagcagcctgcagcctgaagattttgtaacttattactgtctacagcataatagttacccattcactttcggccctgggaccaaagtggatgtcaaacgaacggtggctgcaccatctgtcttcatcttcccgccatctgatgagcagttgaaatctggaactgcctctgttgtgtgcctgctgaataacttctatcccagagaggccaaagtacagtggaaggtggataacgccctccaatcgggtaactcccaggagagtgtcacagagcaggacagcaaggacagcacctacagcctcagcagcaccctgacgctgagcaaagcagactacgagaaacacaaagtctacgcctgcgaagtcacccatcagggcctgagctcgcccgtcacaaagagcttcaacaggggagagtgt

SEQ ID NO: 1903 - DNA, 642 bp, Artificial Sequence
  source: /note="Description of Artificial Sequence: Synthetic polynucleotide"
gacattcagatgacccagtctccatcctccctgtctgcatctgtaggagacagagtcaccatcacttgccgggcaagtcagggcattagaaatgagttaggctggtatcagcagaaaccagggaaagcccctaaacgcctgatctatggtgcatccagtttgcaaagtggggtcccatcaaggttcagcggcagtggatctgggacagagttcactctcacaatcagcagcctgcagcctgaagattttgtaacttattactgtctacagcataatagttacccattcactttcggccaagggaccaaagtggatgtcaaacgaacggtggctgcaccatctgtcttcatcttcccgccatctgatgagcagttgaaatctggaactgcctctgttgtgtgcctgctgaataacttctatcccagagaggccaaagtacagtggaaggtggataacgccctccaatcgggtaactcccaggagagtgtcacagagcaggacagcaaggacagcacctacagcctcagcagcaccctgacgctgagcaaagcagactacgagaaacacaaagtctacgcctgcgaagtcacccatcagggcctgagctcgcccgtcacaaagagcttcaacaggggagagtgt

SEQ ID NO: 1904 - DNA, 642 bp, Artificial Sequence; identical to SEQ ID NO: 1899
  source: /note="Description of Artificial Sequence: Synthetic polynucleotide"

SEQ ID NO: 1905 - DNA, 642 bp, Artificial Sequence
  source: /note="Description of Artificial Sequence: Synthetic polynucleotide"
gacatccagatgacccagtctccatcctccctgtctgcatctataggagacagagtcaccatcacttgccgggcaagtcaggacattagagattatttaggctggtatcagcagaaaccagggaaagcccctaagctcctgatctatggtgcatccagtttgcaaagtggggtcccttcaaggttcagcggcagtggatctgggacagaattcactctcacaatcagcagcctgcagcctgaagatttcgcaacttattactgtctacagcataataattaccccttcactttcggccaagggaccaaagtggatatcaaacgaacggtggctgcaccatctgtcttcatcttcccgccatctgatgagcagttgaaatctggaactgcctctgttgtgtgcctgctgaataacttctatcccagagaggccaaagtacagtggaaggtggataacgccctccaatcgggtaactcccaggagagtgtcacagagcaggacagcaaggacagcacctacagcctcagcagcaccctgacgctgagcaaagcagactacgagaaacacaaagtctacgcctgcgaagtcacccatcagggcctgagctcgcccgtcacaaagagcttcaacaggggagagtgt

SEQ ID NO: 1906 - DNA, 642 bp, Artificial Sequence
  source: /note="Description of Artificial Sequence: Synthetic polynucleotide"
gacatccagatgacccagtctccatcctccctgtctgcatctataggagacagagtcaccatcacttgccgggcaagtcaggacattagagattatttaggctggtatcagcagaaaccagggaaagcccctaagcgcctgatctatggtgcatccagtttgcaaagtggggtcccttcaaggttcagcggcagtggatctgggacagaattcactctcacaatcagcagcctgcagcctgaagatttcgcaacttattactgtctacagcataataattaccccttcactttcggccaagggaccaaagtggatatcaaacgaacggtggctgcaccatctgtcttcatcttcccgccatctgatgagcagttgaaatctggaactgcctctgttgtgtgcctgctgaataacttctatcccagagaggccaaagtacagtggaaggtggataacgccctccaatcgggtaactcccaggagagtgtcacagagcaggacagcaaggacagcacctacagcctcagcagcaccctgacgctgagcaaagcagactacgagaaacacaaagtctacgcctgcgaagtcacccatcagggcctgagctcgcccgtcacaaagagcttcaacaggggagagtgt

SEQ ID NO: 1907 - DNA, 642 bp, Artificial Sequence
  source: /note="Description of Artificial Sequence: Synthetic polynucleotide"
gacatccagatgacccagtctccatcctccctgtctgcatctataggagacagagtcaccatcacttgccgggcaagtcaggacattagagattatttaggctggtatcagcagaaaccagggaaagcccctaagctcctgatctatggtgcatccagtttgcaaagtggggtcccttcaaggttcagcggcagtggatctgggacagaattcactctcacaatcagcagcctgcagcctgaagatttcgcaacttattactgtctacagcataataattaccccttcactttcggccctgggaccaaagtggatatcaaacgaacggtggctgcaccatctgtcttcatcttcccgccatctgatgagcagttgaaatctggaactgcctctgttgtgtgcctgctgaataacttctatcccagagaggccaaagtacagtggaaggtggataacgccctccaatcgggtaactcccaggagagtgtcacagagcaggacagcaaggacagcacctacagcctcagcagcaccctgacgctgagcaaagcagactacgagaaacacaaagtctacgcctgcgaagtcacccatcagggcctgagctcgcccgtcacaaagagcttcaacaggggagagtgt

SEQ ID NO: 1908 - DNA, 642 bp, Artificial Sequence; identical to SEQ ID NO: 1905
  source: /note="Description of Artificial Sequence: Synthetic polynucleotide"

SEQ ID NO: 1909 - DNA, 642 bp, Artificial Sequence; identical to SEQ ID NO: 1905
  source: /note="Description of Artificial Sequence: Synthetic polynucleotide"

SEQ ID NO: 1910 - DNA, 642 bp, Artificial Sequence; identical to SEQ ID NO: 1905
  source: /note="Description of Artificial Sequence: Synthetic polynucleotide"

SEQ ID NO: 1911 - DNA, 642 bp, Artificial Sequence; identical to SEQ ID NO: 1905
  source: /note="Description of Artificial Sequence: Synthetic polynucleotide"

SEQ ID NO: 1912 - DNA, 642 bp, Artificial Sequence
  source: /note="Description of Artificial Sequence: Synthetic polynucleotide"
gacatccagatgacccagtctccatcctccctgtctgcatctataggagacagagtcaccatcacttgccgggcaagtcaggaccttagaaattatttaggctggtatcaccagaaaccagggaaagcccctaagcgcctgatctatggtgcatccagtttgcaaagtggggtcccttcaaggttcagcggcagtggatctgggacagaattcactctcacaatcagcagcctgcagcctgaagatttcgcaacttattactgtctacagcataataattaccccttcactttcggccctgggaccaaagtggatatcaaacgaacggtggctgcaccatctgtcttcatcttcccgccatctgatgagcagttgaaatctggaactgcctctgttgtgtgcctgctgaataacttctatcccagagaggccaaagtacagtggaaggtggataacgccctccaatcgggtaactcccaggagagtgtcacagagcaggacagcaaggacagcacctacagcctcagcagcaccctgacgctgagcaaagcagactacgagaaacacaaagtctacgcctgcgaagtcacccatcagggcctgagctcgcccgtcacaaagagcttcaacaggggagagtgt

SEQ ID NO: 1913 - DNA, 642 bp, Artificial Sequence
  source: /note="Description of Artificial Sequence: Synthetic polynucleotide"
gacatccagatgacccagtctccatcctccctgtctgcatctataggagacagagtcaccatcacttgccgggcaagtcaggaccttagaaattatttaggctggtatcaacagaaaccagggaaagcccctaagctcctgatctatggtgcatccagtttgcaaagtggggtcccttcaaggttcagcggcagtggatctgggacagaattcactctcacaatcagcagcctgcagcctgaagatttcgcaacttattactgtctacagcataataattaccccttcactttcggccctgggaccaaagtggatatcaaacgaacggtggctgcaccatctgtcttcatcttcccgccatctgatgagcagttgaaatctggaactgcctctgttgtgtgcctgctgaataacttctatcccagagaggccaaagtacagtggaaggtggataacgccctccaatcgggtaactcccaggagagtgtcacagagcaggacagcaaggacagcacctacagcctcagcagcaccctgacgctgagcaaagcagactacgagaaacacaaagtctacgcctgcgaagtcacccatcagggcctgagctcgcccgtcacaaagagcttcaacaggggagagtgt

SEQ ID NO: 1914 - DNA, 642 bp, Artificial Sequence; identical to SEQ ID NO: 1913
  source: /note="Description of Artificial Sequence: Synthetic polynucleotide"

SEQ ID NO: 1915 - DNA, 642 bp, Artificial Sequence
  source: /note="Description of Artificial Sequence: Synthetic polynucleotide"
gacatccagatgacccagtctccatcctccctgtctgcatctataggagacagagtcaccatcacttgccgggcaagtcaggaccttagaaattatttaggctggtatcaccagaaaccagggaaagcccctaagctcctgatctatggtgcatccagtttgcaaagtggggtcccttcaaggttcagcggcagtggatctgggacagaattcactctcacaatcagcagcctgcagcctgaagatttcgcaacttattactgtctacagcataataattaccccttcactttcggccctgggaccaaagtggatatcaaacgaacggtggctgcaccatctgtcttcatcttcccgccatctgatgagcagttgaaatctggaactgcctctgttgtgtgcctgctgaataacttctatcccagagaggccaaagtacagtggaaggtggataacgccctccaatcgggtaactcccaggagagtgtcacagagcaggacagcaaggacagcacctacagcctcagcagcaccctgacgctgagcaaagcagactacgagaaacacaaagtctacgcctgcgaagtcacccatcagggcctgagctcgcccgtcacaaagagcttcaacaggggagagtgt

SEQ ID NO: 1916 - DNA, 642 bp, Artificial Sequence
  source: /note="Description of Artificial Sequence: Synthetic polynucleotide"
gacatccagatgacccagtctccatcctccctgtctgcatctataggagacagagtcaccatcacttgccgggcaagtcaggaccttagaaattatttaggctggtatcaacagaaaccagggaaagcccctaagcgcctgatctatggtgcatccagtttgcaaagtggggtcccttcaaggttcagcggcagtggatctgggacagaattcactctcacaatcagcagcctgcagcctgaagatttcgcaacttattactgtctacagcataataattaccccttcactttcggccctgggaccaaagtggatatcaaacgaacggtggctgcaccatctgtcttcatcttcccgccatctgatgagcagttgaaatctggaactgcctctgttgtgtgcctgctgaataacttctatcccagagaggccaaagtacagtggaaggtggataacgccctccaatcgggtaactcccaggagagtgtcacagagcaggacagcaaggacagcacctacagcctcagcagcaccctgacgctgagcaaagcagactacgagaaacacaaagtctacgcctgcgaagtcacccatcagggcctgagctcgcccgtcacaaagagcttcaacaggggagagtgt

SEQ ID NO: 1917 - DNA, 642 bp, Artificial Sequence; identical to SEQ ID NO: 1916
  source: /note="Description of Artificial Sequence: Synthetic polynucleotide"

SEQ ID NO: 1918 - DNA, 642 bp, Artificial Sequence; identical to SEQ ID NO: 1915
  source: /note="Description of Artificial Sequence: Synthetic polynucleotide"

SEQ ID NO: 1919 - DNA, 642 bp, Artificial Sequence; identical to SEQ ID NO: 1912
  source: /note="Description of Artificial Sequence: Synthetic polynucleotide"

SEQ ID NO: 1920 - DNA, 642 bp, Artificial Sequence; identical to SEQ ID NO: 1913
  source: /note="Description of Artificial Sequence: Synthetic polynucleotide"

SEQ ID NO: 1921 - DNA, 642 bp, Artificial Sequence; identical to SEQ ID NO: 1913
  source: /note="Description of Artificial Sequence: Synthetic polynucleotide"

SEQ ID NO: 1922 - DNA, 642 bp, Artificial Sequence
  source: /note="Description of Artificial Sequence: Synthetic polynucleotide"
gacatccagatgacccagtctccatcctccctgtctgcatctataggagacagagtcaccatcacttgccgggcaagtcaggaccttagaaattatttaggctggtatcaacagaaaccagggaaagcccctaagctcctgatctatggtgcatccagtttgcaaagtggggtcccttcaaggttcagcggcagtggatctgggacagaattcactctcacaatcagcagcctgcagcctgaagatttcgcaacttattactgtctacagcataataattaccccttcactttcggccaagggaccaaagtggatatcaaacgaacggtggctgcaccatctgtcttcatcttcccgccatctgatgagcagttgaaatctggaactgcctctgttgtgtgcctgctgaataacttctatcccagagaggccaaagtacagtggaaggtggataacgccctccaatcgggtaactcccaggagagtgtcacagagcaggacagcaaggacagcacctacagcctcagcagcaccctgacgctgagcaaagcagactacgagaaacacaaagtctacgcctgcgaagtcacccatcagggcctgagctcgcccgtcacaaagagcttcaacaggggagagtgt

SEQ ID NO: 1923 - DNA, 642 bp, Artificial Sequence; identical to SEQ ID NO: 1913
  source: /note="Description of Artificial Sequence: Synthetic polynucleotide"

SEQ ID NO: 1924 - DNA, 639 bp, Artificial Sequence
  source: /note="Description of Artificial Sequence: Synthetic polynucleotide"
gacatccagatgacccagtctccatcctccctgtctgcatctgtaggagacagagtcaccatcacttgccaggcgagtcaggacattagcaactatttaaattggtatcagcagaaaccagggaaagcccctaagctcctgatctacgatgcatccaatttggaaacaggggtcccatcaaggttcagtggaagtggatctgggacagattttagtctcaccatcagcagcctgcagcctgaagattttgcaacatattactgtcaacagtatgatattctcctcactttcggcggagggaccaaggtggagatcaagcgaacggtggctgcaccatctgtcttcatcttcccgccatctgatgagcagttgaaatctggaactgcctctgttgtgtgcctgctgaataacttctatcccagagaggccaaagtacagtggaaggtggataacgccctccaatcgggtaactcccaggagagtgtcacagagcaggacagcaaggacagcacctacagcctcagcagcaccctgacgctgagcaaagcagactacgagaaacacaaagtctacgcctgcgaagtcacccatcagggcctgagctcgcccgtcacaaagagcttcaacaggggagagtgt

SEQ ID NO: 1925 - DNA, 639 bp, Artificial Sequence; identical to SEQ ID NO: 1924
  source: /note="Description of Artificial Sequence: Synthetic polynucleotide"

SEQ ID NO: 1926 - DNA, 639 bp, Artificial Sequence
  source: /note="Description of Artificial Sequence: Synthetic polynucleotide"
gacatccagatgacccagtctccatcctccctgtctgcatctgtaggagacagagtcaccatcacttgccaggcgagtcaggacattagcaactatttaaattggtatcagcagaaaccagggaaagcccctaagctcctgatctacgatgcatccaatttggaaacaggggtcccatcaaggttcagtggaagtggatctgggacagattttagtctcaccatcagcagcctgcagcctgaagatattgcaacatattactgtcaacagtatgatattctcctcactttcggcggagggaccaaggtggagatcaagcgaacggtggctgcaccatctgtcttcatcttcccgccatctgatgagcagttgaaatctggaactgcctctgttgtgtgcctgctgaataacttctatcccagagaggccaaagtacagtggaaggtggataacgccctccaatcgggtaactcccaggagagtgtcacagagcaggacagcaaggacagcacctacagcctcagcagcaccctgacgctgagcaaagcagactacgagaaacacaaagtctacgcctgcgaagtcacccatcagggcctgagctcgcccgtcacaaagagcttcaacaggggagagtgt

SEQ ID NO: 1927 - DNA, 639 bp, Artificial Sequence
  source: /note="Description of Artificial Sequence: Synthetic polynucleotide"
gacatccagatgacccagtctccatcctccctgtctgcatctgtaggagacagagtcaccatcacttgccaggcgagtcaggacattagcaactatttaaattggtatcagcagaaaccagggaaagcccctaagctcctgatctacgatgcatccaatttggaaacaggggtcccatcaaggttcagtggaagtggatctgggacagattttagtttcaccatcagcagcctgcagcctgaagattttgcaacatattactgtcaacagtatgatattctcctcactttcggcggagggaccaaggtggagatcaagcgaacggtggctgcaccatctgtcttcatcttcccgccatctgatgagcagttgaaatctggaactgcctctgttgtgtgcctgctgaataacttctatcccagagaggccaaagtacagtggaaggtggataacgccctccaatcgggtaactcccaggagagtgtcacagagcaggacagcaaggacagcacctacagcctcagcagcaccctgacgctgagcaaagcagactacgagaaacacaaagtctacgcctgcgaagtcacccatcagggcctgagctcgcccgtcacaaagagcttcaacaggggagagtgt

SEQ ID NO: 1928 - DNA, 639 bp, Artificial Sequence; identical to SEQ ID NO: 1926
  source: /note="Description of Artificial Sequence: Synthetic polynucleotide"

SEQ ID NO: 1929 - DNA, 639 bp, Artificial Sequence; identical to SEQ ID NO: 1927
  source: /note="Description of Artificial Sequence: Synthetic polynucleotide"

SEQ ID NO: 1930 - DNA, 639 bp, Artificial Sequence; identical to SEQ ID NO: 1888
  source: /note="Description of Artificial Sequence: Synthetic polynucleotide"

SEQ ID NO: 1931 - DNA, 639 bp, Artificial Sequence; identical to SEQ ID NO: 1924
  source: /note="Description of Artificial Sequence: Synthetic polynucleotide"

SEQ ID NO: 1932 - DNA, 639 bp, Artificial Sequence; identical to SEQ ID NO: 1924
  source: /note="Description of Artificial Sequence: Synthetic polynucleotide"

SEQ ID NO: 1933 - DNA, 642 bp, Artificial Sequence; identical to SEQ ID NO: 1886
  source: /note="Description of Artificial Sequence: Synthetic polynucleotide"

SEQ ID NO: 1934 - DNA, 642 bp, Artificial Sequence; identical to SEQ ID NO: 1886
  source: /note="Description of Artificial Sequence: Synthetic polynucleotide"

SEQ ID NO: 1935 - DNA, 642 bp, Artificial Sequence; identical to SEQ ID NO: 1905
  source: /note="Description of Artificial Sequence: Synthetic polynucleotide"

SEQ ID NO: 1936 - DNA, 642 bp, Artificial Sequence; identical to SEQ ID NO: 1905
  source: /note="Description of Artificial Sequence: Synthetic polynucleotide"

SEQ ID NO: 1937 - DNA, 642 bp, Artificial Sequence; identical to SEQ ID NO: 1907
  source: /note="Description of Artificial Sequence: Synthetic polynucleotide"

SEQ ID NO: 1938 - DNA, 642 bp, Artificial Sequence; identical to SEQ ID NO: 1907
  source: /note="Description of Artificial Sequence: Synthetic polynucleotide"

SEQ ID NO: 1939 - DNA, 642 bp, Artificial Sequence; identical to SEQ ID NO: 1907
  source: /note="Description of Artificial Sequence: Synthetic polynucleotide"

SEQ ID NO: 1940 - DNA, 639 bp, Artificial Sequence
  source: /note="Description of Artificial Sequence: Synthetic polynucleotide"
gacatccagatgacccagtctccatcctccctgtctgcatctgtgggggacagagtcaccatcacttgccaggcgagtcaggacattaccaactatttaaattggtatcagcagaaaccagggaaagcccctaaactcctgatctacgatgcttccaatttggagccaggggtcccatcaaggttcagtggaagtggatctgggacagattttactctcaccatcagcagcctgcagcctgaagattttgcaacatattactgtcaacagtatgatgatctattcactttcggccctgggaccaaagtggatatcaaacgaacggtggctgcaccatctgtcttcatcttcccgccatctgatgagcagttgaaatctggaactgcctctgttgtgtgcctgctgaataacttctatcccagagaggccaaagtacagtggaaggtggataacgccctccaatcgggtaactcccaggagagtgtcacagagcaggacagcaaggacagcacctacagcctcagcagcaccctgacgctgagcaaagcagactacgagaaacacaaagtctacgcctgcgaagtcacccatcagggcctgagctcgcccgtcacaaagagcttcaacaggggagagtgt

SEQ ID NO: 1941 - DNA, 639 bp, Artificial Sequence
  source: /note="Description of Artificial Sequence: Synthetic polynucleotide"
gacatccagatgacccagtctccatcctccctgtctgcatctgtgggggacagagtcaccatcacttgccaggcgagtcaggacattaccaactatttaaattggtatcagcagaaaccagggaaagcccctaaactcctgatctacgatgcttccaatttggagccaggggtcccatcaaggttcagtggaagtggatctgggacagattttactctcaccatcagcagcctgcagcctgaagatattgcaacatattactgtcaacagtatgatgatctattcactttcggccctgggaccaaagtggatatcaaacgaacggtggctgcaccatctgtcttcatcttcccgccatctgatgagcagttgaaatctggaactgcctctgttgtgtgcctgctgaataacttctatcccagagaggccaaagtacagtggaaggtggataacgccctccaatcgggtaactcccaggagagtgtcacagagcaggacagcaaggacagcacctacagcctcagcagcaccctgacgctgagcaaagcagactacgagaaacacaaagtctacgcctgcgaagtcacccatcagggcctgagctcgcccgtcacaaagagcttcaacaggggagagtgt

SEQ ID NO: 1942 - DNA, 639 bp, Artificial Sequence; identical to SEQ ID NO: 1940
  source: /note="Description of Artificial Sequence: Synthetic polynucleotide"

SEQ ID NO: 1943 - DNA, 639 bp, Artificial Sequence
  source: /note="Description of Artificial Sequence: Synthetic polynucleotide"
gacatccagatgacccagtctccatcctccctgtctgcatctgtgggggacagagtcaccatcacttgccaggcgagtcaggacattaccaactatttaaattggtatcagcagaaaccagggaaagcccctaaactcctgatctacgatgcttccaatttggagccaggggtcccatcaaggttcagtggaagtggatctgggacagattttactttcaccatcagcagcctgcagcctgaagattttgcaacatattactgtcaacagtatgatgatctattcactttcggccctgggaccaaagtggatatcaaacgaacggtggctgcaccatctgtcttcatcttcccgccatctgatgagcagttgaaatctggaactgcctctgttgtgtgcctgctgaataacttctatcccagagaggccaaagtacagtggaaggtggataacgccctccaatcgggtaactcccaggagagtgtcacagagcaggacagcaaggacagcacctacagcctcagcagcaccctgacgctgagcaaagcagactacgagaaacacaaagtctacgcctgcgaagtcacccatcagggcctgagctcgcccgtcacaaagagcttcaacaggggagagtgt

SEQ ID NO: 1944 - DNA, 639 bp, Artificial Sequence; identical to SEQ ID NO: 1941
  source: /note="Description of Artificial Sequence: Synthetic polynucleotide"

SEQ ID NO: 1945 - DNA, 639 bp, Artificial Sequence; identical to SEQ ID NO: 1943
  source: /note="Description of Artificial Sequence: Synthetic polynucleotide"

SEQ ID NO: 1946 - DNA, 639 bp, Artificial Sequence; identical to SEQ ID NO: 1896
  source: /note="Description of Artificial Sequence: Synthetic polynucleotide"

SEQ ID NO: 1947 - DNA, 639 bp, Artificial Sequence; identical to SEQ ID NO: 1940
  source: /note="Description of Artificial Sequence: Synthetic polynucleotide"

SEQ ID NO: 1948 - DNA, 639 bp, Artificial Sequence; identical to SEQ ID NO: 1940
  source: /note="Description of Artificial Sequence: Synthetic polynucleotide"

SEQ ID NO: 1949 - DNA, 639 bp, Artificial Sequence
  source: /note="Description of Artificial Sequence: Synthetic polynucleotide"
gacatccagatgacccagtctccatcctccctgtctgcatctgtgggggacagagtcaccatcacttgccaggcgagtcaggacattaccaactatttaaattggtatcagcagaaaccagggaaagcccctaaactcctgatctacgatgcttccaatttggagccaggggtcccatcaaggttcagtggaagtggatctgggacagattttactctcaccatcagcagcctgcagcctgaagattttgcaacatattactgtcaacagtatgatgatctattcactttcggccaagggaccaaagtggatatcaaacgaacggtggctgcaccatctgtcttcatcttcccgccatctgatgagcagttgaaatctggaactgcctctgttgtgtgcctgctgaataacttctatcccagagaggccaaagtacagtggaaggtggataacgccctccaatcgggtaactcccaggagagtgtcacagagcaggacagcaaggacagcacctacagcctcagcagcaccctgacgctgagcaaagcagactacgagaaacacaaagtctacgcctgcgaagtcacccatcagggcctgagctcgcccgtcacaaagagcttcaacaggggagagtgt

SEQ ID NO: 1950 - DNA, 639 bp, Artificial Sequence; identical to SEQ ID NO: 1949
  source: /note="Description of Artificial Sequence: Synthetic polynucleotide"

SEQ ID NO: 1951 - DNA, 642 bp, Artificial Sequence
  source: /note="Description of Artificial Sequence: Synthetic polynucleotide"
gaaattgtgttgacgcagtctccaggcaccctgtctttgtctccaggggaaagagccaccctctcctgcagggccagtcagatttttaccagcacctacttagcctggtaccagcagaaacctggccaggctcccaggctcctcatctatggtgcatccagcagggccactggcatcccagacaggttcagtggcagtgggtctgggacagacttcactctcaccatcagcagattggagcctgaagattttgcagtgtattactgtcagcagtatggtagctcacctcgcttcggccaagggacacgactggagattaaacgaacggtggctgcaccatctgtcttcatcttcccgccatctgatgagcagttgaaatctggaactgcctctgttgtgtgcctgctgaataacttctatcccagagaggccaaagtacagtggaaggtggataacgccctccaatcgggtaactcccaggagagtgtcacagagcaggacagcaaggacagcacctacagcctcagcagcaccctgacgctgagcaaagcagactacgagaaacacaaagtctacgcctgcgaagtcacccatcagggcctgagctcgcccgtcacaaagagcttcaacaggggagagtgt

SEQ ID NO: 1952 - DNA, 642 bp, Artificial Sequence; identical to SEQ ID NO: 1951
  source: /note="Description of Artificial Sequence: Synthetic polynucleotide"

SEQ ID NO: 1953 - DNA, 642 bp, Artificial Sequence; identical to SEQ ID NO: 1951
  source: /note="Description of Artificial Sequence: Synthetic polynucleotide"

SEQ ID NO: 1954 - DNA, 642 bp, Artificial Sequence; identical to SEQ ID NO: 1951
  source: /note="Description of Artificial Sequence: Synthetic polynucleotide"

SEQ ID NO: 1955 - DNA, 642 bp, Artificial Sequence
  source: /note="Description of Artificial Sequence: Synthetic polynucleotide"
gaaatagtgatgacgcagtctccagccaccctgtctgtgtctccaggggaaagagccaccctctcctgcagggccagtcagagtgttagcagcaacttagcctggtaccagcagaaacctggccaggctcccaggctcctcatctatggtgcagccaccagggccactggtatcccagccaggttcagtggcagtgggtctgggacagagttcactctcaccatcagcagcctgcagtctgaagattttgcagtttattactgtcagcagtataataactggcctctcactttcggcggagggaccaaggtggagatcaaacgaacggtggctgcaccatctgtcttcatcttcccgccatctgatgagcagttgaaatctggaactgcctctgttgtgtgcctgctgaataacttctatcccagagaggccaaagtacagtggaaggtggataacgccctccaatcgggtaactcccaggagagtgtcacagagcaggacagcaaggacagcacctacagcctcagcagcaccctgacgctgagcaaagcagactacgagaaacacaaagtctacgcctgcgaagtcacccatcagggcctgagctcgcccgtcacaaagagcttcaacaggggagagtgt

SEQ ID NO: 1956 - DNA, 642 bp, Artificial Sequence; identical to SEQ ID NO: 1955
  source: /note="Description of Artificial Sequence: Synthetic polynucleotide"

SEQ ID NO: 1957 - DNA, 642 bp, Artificial Sequence; identical to SEQ ID NO: 1955
  source: /note="Description of Artificial Sequence: Synthetic polynucleotide"

SEQ ID NO: 1958 - DNA, 642 bp, Artificial Sequence; identical to SEQ ID NO: 1894
  source: /note="Description of Artificial Sequence: Synthetic polynucleotide"

SEQ ID NO: 1959 - DNA, 642 bp, Artificial Sequence
  source: /note="Description of Artificial Sequence: Synthetic polynucleotide"
gaaatagtgatgacgcagtctccagccaccctgtctgtgtctccaggggaaagagccaccctctcctgcagggccagtcagagtgttagcagcaacttagcctggtaccagcagaaacctggccaggctcccaggctcctcatctatggtgcagccaccagggccactggtatcccagccaggttcagtggcagtgggtctgggacagagttcactctcaccatcagcagcctggagcctgaagattttgcagtttattactgtcagcagtataataacttccctctcactttcggcggagggaccaaggtggagatcaaacgaacggtggctgcaccatctgtcttcatcttcccgccatctgatgagcagttgaaatctggaactgcctctgttgtgtgcctgctgaataacttctatcccagagaggccaaagtacagtggaaggtggataacgccctccaatcgggtaactcccaggagagtgtcacagagcaggacagcaaggacagcacctacagcctcagcagcaccctgacgctgagcaaagcagactacgagaaacacaaagtctacgcctgcgaagtcacccatcagggcctgagctcgcccgtcacaaagagcttcaacaggggagagtgt

SEQ ID NO: 1960 - DNA, 642 bp, Artificial Sequence
  source: /note="Description of Artificial Sequence: Synthetic polynucleotide"
gaaatagtgatgacgcagtctccagccaccctgtctgtgtctccaggggaaagagccaccctctcctgcagggccagtcagagtgttagcagcaacttagcctggtaccagcagaaacctggccaggctcccaggctcctcatctatggtgcagccaccagggccactggtatcccagccaggttcagtggcagtgggtctgggacagagttcactctcaccatcagcagcctggagcctgaagattttgcagtttattactgtcagcagtataataactatcctctcactttcggcggagggaccaaggtggagatcaaacgaacggtggctgcaccatctgtcttcatcttcccgccatctgatgagcagttgaaatctggaactgcctctgttgtgtgcctgctgaataacttctatcccagagaggccaaagtacagtggaaggtggataacgccctccaatcgggtaactcccaggagagtgtcacagagcaggacagcaaggacagcacctacagcctcagcagcaccctgacgctgagcaaagcagactacgagaaacacaaagtctacgcctgcgaagtcacccatcagggcctgagctcgcccgtcacaaagagcttcaacaggggagagtgt

SEQ ID NO: 1961 - DNA, 642 bp, Artificial Sequence
  source: /note="Description of Artificial Sequence: Synthetic polynucleotide"
gaaatagtgatgacgcagtctccagccaccctgtctgtgtctccaggggaaagagccaccctctcctgcagggccagtcagagtgttagcagcaacttagcctggtaccagcagaaacctggccaggctcccaggctcctcatctatggtgcagccaccagggccactggtatcccagccaggttcagtggcagtgggtctgggacagagttcactctcaccatcagcagcctggagcctgaagattttgcagtttattactgtcagcagtataataactggcctctcactttcggcggagggaccaaggtggagatcaaacgaacggtggctgcaccatctgtcttcatcttcccgccatctgatgagcagttgaaatctggaactgcctctgttgtgtgcctgctgaataacttctatcccagagaggccaaagtacagtggaaggtggataacgccctccaatcgggtaactcccaggagagtgtcacagagcaggacagcaaggacagcacctacagcctcagcagcaccctgacgctgagcaaagcagactacgagaaacacaaagtctacgcctgcgaagtcacccatcagggcctgagctcgcccgtcacaaagagcttcaacaggggagagtgt

SEQ ID NO: 1962 - DNA, 642 bp, Artificial Sequence; identical to SEQ ID NO: 1961
  source: /note="Description of Artificial Sequence: Synthetic polynucleotide"

SEQ ID NO: 1963 - DNA, 645 bp, Artificial Sequence
  source: /note="Description of Artificial Sequence: Synthetic polynucleotide"
gaaattgtgttgacgcagtctccaggcaccctgtctttgtctccaggggaaagagccaccctctcctgcagggccagtcagagtattagttacagttacttagcctggtaccagcagaaacctggccaggctccccggctcctcatctatggtgcatccagcagggccactggcatcccagacaggttcagtggcagtgggtctgggacagacttcactctcaccatcagcagactggagcctgatgattttgcagtgtattactgtcagcagtatggtagttcaccgctcactttcggcggagggaccaaggtggagatcaaacgaacggtggctgcaccatctgtcttcatcttcccgccatctgatgagcagttgaaatctggaactgcctctgttgtgtgcctgctgaataacttctatcccagagaggccaaagtacagtggaaggtggataacgccctccaatcgggtaactcccaggagagtgtcacagagcaggacagcaaggacagcacctacagcctcagcagcaccctgacgctgagcaaagcagactacgagaaacacaaagtctacgcctgcgaagtcacccatcagggcctgagctcgcccgtcacaaagagcttcaacaggggagagtgt

SEQ ID NO: 1964 - DNA, 645 bp, Artificial Sequence; identical to SEQ ID NO: 1893
  source: /note="Description of Artificial Sequence: Synthetic polynucleotide"

SEQ ID NO: 1965 - DNA, 645 bp, Artificial Sequence; identical to SEQ ID NO: 1963
  source: /note="Description of Artificial Sequence: Synthetic polynucleotide"

SEQ ID NO: 1966 - DNA, 645 bp, Artificial Sequence; identical to SEQ ID NO: 1963
  source: /note="Description of Artificial Sequence: Synthetic polynucleotide"

SEQ ID NO: 1967 - DNA, 645 bp, Artificial Sequence; identical to SEQ ID NO: 1963
  source: /note="Description of Artificial Sequence: Synthetic polynucleotide"

SEQ ID NO: 1968 - DNA, 645 bp, Artificial Sequence; identical to SEQ ID NO: 1893
  source: /note="Description of Artificial Sequence: Synthetic polynucleotide"

SEQ ID NO: 1969 - DNA, 645 bp, Artificial Sequence; identical to SEQ ID NO: 1893
  source: /note="Description of Artificial Sequence: Synthetic polynucleotide"

SEQ ID NO: 1970 - DNA, 660 bp, Artificial Sequence; identical to SEQ ID NO: 1889
  source: /note="Description of Artificial Sequence: Synthetic polynucleotide"

SEQ ID NO: 1971 - DNA, 660 bp, Artificial Sequence; identical to SEQ ID NO: 1889
  source: /note="Description of Artificial Sequence: Synthetic polynucleotide"

SEQ ID NO: 1972 - DNA, 660 bp, Artificial Sequence; identical to SEQ ID NO: 1889
  source: /note="Description of Artificial Sequence: Synthetic polynucleotide"

SEQ ID NO: 1973 - DNA, 660 bp, Artificial Sequence; identical to SEQ ID NO: 1889
  source: /note="Description of Artificial Sequence: Synthetic polynucleotide"

SEQ ID NO: 1974 - DNA, 660 bp, Artificial Sequence; identical to SEQ ID NO: 1889
  source: /note="Description of Artificial Sequence: Synthetic polynucleotide"

SEQ ID NO: 1975 - DNA, 660 bp, Artificial Sequence; identical to SEQ ID NO: 1889
  source: /note="Description of Artificial Sequence: Synthetic polynucleotide"

SEQ ID NO: 1976 - DNA, 660 bp, Artificial Sequence; identical to SEQ ID NO: 1889
  source: /note="Description of Artificial Sequence: Synthetic polynucleotide"

SEQ ID NO: 1977 - DNA, 660 bp, Artificial Sequence; identical to SEQ ID NO: 1889
  source: /note="Description of Artificial Sequence: Synthetic polynucleotide"

SEQ ID NO: 1978 - DNA, 660 bp, Artificial Sequence; identical to SEQ ID NO: 1889
  source: /note="Description of Artificial Sequence: Synthetic polynucleotide"

SEQ ID NO: 1979 - DNA, 660 bp, Artificial Sequence
  source: /note="Description of Artificial Sequence: Synthetic polynucleotide"
gacatcgtgatgacccagtctccagactccctggctgtgtctctgggcgagagggccaccatcaactgcaagtccagccagagtgttttatccagctccaacaataagaactacatagcttggtaccagcagaaaccaggacaacctcctaagctgctcatttactgggcatctacccgggaatccggggtccctgaccgattcagtggcagcgggtctgggacagatttcactctcaccatcagcagcctgcaggctgaagatgtggcagttttttactgtcaacaatattatagtactccgtggacgttcggccaagggaccaaggtggaaatcaaacgaacggtggctgcaccatctgtcttcatcttcccgccatctgatgagcagttgaaatctggaactgcctctgttgtgtgcctgctgaataacttctatcccagagaggccaaagtacagtggaaggtggataacgccctccaatcgggtaactcccaggagagtgtcacagagcaggacagcaaggacagcacctacagcctcagcagcaccctgacgctgagcaaagcagactacgagaaacacaaagtctacgcctgcgaagtcacccatcagggcctgagctcgcccgtcacaaagagcttcaacaggggagagtgt

SEQ ID NO: 1980 - DNA, 660 bp, Artificial Sequence; identical to SEQ ID NO: 1979
  source: /note="Description of Artificial Sequence: Synthetic polynucleotide"

SEQ ID NO: 1981 - DNA, 660 bp, Artificial Sequence
  source: /note="Description of Artificial Sequence: Synthetic polynucleotide"
gacatcgtgatgacccagtctccagactccctgtctgtgtctctgggcgagagggccaccatcaactgcaagtccagccagagtgttttatccagctccaacaataagaactacttagcttggtaccaacagaaaccaggacagcctcctaacctgctcatttactggacttctacccgagaatccggggtccctgaccgattcagtggcagcgggtctgggacagatttcactctcaccatcaacagcctgcaggctgaagatgtggctgtttattactgtcagcaatattatcgtactccgtggacgttcggccaagggaccaaggtggaaatcaaacgaacggtggctgcaccatctgtcttcatcttcccgccatctgatgagcagttgaaatctggaactgcctctgttgtgtgcctgctgaataacttctatcccagagaggccaaagtacagtggaaggtggataacgccctccaatcgggtaactcccaggagagtgtcacagagcaggacagcaaggacagcacctacagcctcagcagcaccctgacgctgagcaaagcagactacgagaaacacaaagtctacgcctgcgaagtcacccatcagggcctgagctcgcccgtcacaaagagcttcaacaggggagagtgt

SEQ ID NO: 1982 - DNA, 660 bp, Artificial Sequence; identical to SEQ ID NO: 1981
  source: /note="Description of Artificial Sequence: Synthetic polynucleotide"

SEQ ID NO: 1983 - DNA, 660 bp, Artificial Sequence; identical to SEQ ID NO: 1891
  source: /note="Description of Artificial Sequence: Synthetic polynucleotide"

SEQ ID NO: 1984 - DNA, 660 bp, Artificial Sequence; identical to SEQ ID NO: 1981
  source: /note="Description of Artificial Sequence: Synthetic polynucleotide"

SEQ ID NO: 1985 - DNA, 660 bp, Artificial Sequence; identical to SEQ ID NO: 1981
  source: /note="Description of Artificial Sequence: Synthetic polynucleotide"

SEQ ID NO: 1986 - DNA, 660 bp, Artificial Sequence; identical to SEQ ID NO: 1891
  source: /note="Description of Artificial Sequence: Synthetic polynucleotide"

SEQ ID NO: 1987 - DNA, 660 bp, Artificial Sequence; identical to SEQ ID NO: 1891
  source: /note="Description of Artificial Sequence: Synthetic polynucleotide"

SEQ ID NO: 1988 - DNA, 660 bp, Artificial Sequence
  source: /note="Description of Artificial Sequence: Synthetic polynucleotide"
gacatcgtgatgacccagtctccagactccctggctgtgtctctgggcgagagggccaccatcaactgcaagtccagccagagtgttttatccagctccaacaataagaactacttagcttggtaccaacagaaaccaggacagcctcctaaactgctcatttactggacttctacccgagaatccggggtccctgaccgattcagtggcagcgggtctgggacagatttcactctcaccatcaacagcctgcaggctgaagatgtggctgtttattactgtcagcaatattatcgtactccgtggacgttcggccaagggaccaaggtggaaatcaaacgaacggtggctgcaccatctgtcttcatcttcccgccatctgatgagcagttgaaatctggaactgcctctgttgtgtgcctgctgaataacttctatcccagagaggccaaagtacagtggaaggtggataacgccctccaatcgggtaactcccaggagagtgtcacagagcaggacagcaaggacagcacctacagcctcagcagcaccctgacgctgagcaaagcagactacgagaaacacaaagtctacgcctgcgaagtcacccatcagggcctgagctcgcccgtcacaaagagcttcaacaggggagagtgt

SEQ ID NO: 1989 - DNA, 660 bp, Artificial Sequence; identical to SEQ ID NO: 1981
  source: /note="Description of Artificial Sequence: Synthetic polynucleotide"

SEQ ID NO: 1990 - DNA, 660 bp, Artificial Sequence; identical to SEQ ID NO: 1890
  source: /note="Description of Artificial Sequence: Synthetic polynucleotide"

SEQ ID NO: 1991 - DNA, 660 bp, Artificial Sequence; identical to SEQ ID NO: 1890
  source: /note="Description of Artificial Sequence: Synthetic polynucleotide"

SEQ ID NO: 1992 - DNA, 660 bp, Artificial Sequence; identical to SEQ ID NO: 1890
  source: /note="Description of Artificial Sequence: Synthetic polynucleotide"

SEQ ID NO: 1993 - DNA, 660 bp, Artificial Sequence; identical to SEQ ID NO: 1979
  source: /note="Description of Artificial Sequence: Synthetic polynucleotide"

SEQ ID NO: 1994 - DNA, 660 bp, Artificial Sequence; identical to SEQ ID NO: 1979
  source: /note="Description of Artificial Sequence: Synthetic polynucleotide"

SEQ ID NO: 1995 - DNA, 660 bp, Artificial Sequence; identical to SEQ ID NO: 1892
  source: /note="Description of Artificial Sequence: Synthetic polynucleotide"

SEQ ID NO: 1996 - DNA, 660 bp, Artificial Sequence; identical to SEQ ID NO: 1892
  source: /note="Description of Artificial Sequence: Synthetic polynucleotide"

SEQ ID NO: 1997 - DNA, 660 bp, Artificial Sequence; identical to SEQ ID NO: 1892
  source: /note="Description of Artificial Sequence: Synthetic polynucleotide"

SEQ ID NO: 1998 - DNA, 660 bp, Artificial Sequence; identical to SEQ ID NO: 1892
  source: /note="Description of Artificial Sequence: Synthetic polynucleotide"

SEQ ID NO: 1999 - DNA, 660 bp, Artificial Sequence; identical to SEQ ID NO: 1892
  source: /note="Description of Artificial Sequence: Synthetic polynucleotide"

SEQ ID NO: 2000 - DNA, 660 bp, Artificial Sequence; identical to SEQ ID NO: 1892
  source: /note="Description of Artificial Sequence: Synthetic polynucleotide"

SEQ ID NO: 2001 - DNA, 660 bp, Artificial Sequence; identical to SEQ ID NO: 1892
  source: /note="Description of Artificial Sequence: Synthetic polynucleotide"

SEQ ID NO: 2002 - DNA, 660 bp, Artificial Sequence
  source: /note="Description of Artificial Sequence: Synthetic polynucleotide"
gacatcgtgatgacccagtctccagactccctgtctgtgtctctgggcgagagggccaccatcaactgcaagtccagccagagtgttttatccagctccaacaataagaactacttagcttggtaccagcagaaaccaggacagcctcctaacctgctcatttactggacttctacccgagaatccggggtccctgaccgattcagtggcagcgggtctgggacagatttcactctcaccatcaacagcctgcaggctgaagatgtggctgtttattactgtcagcaatattatcgtactccgtggacgttcggccaagggaccaaggtggaaatcaaacgaacggtggctgcaccatctgtcttcatcttcccgccatctgatgagcagttgaaatctggaactgcctctgttgtgtgcctgctgaataacttctatcccagagaggccaaagtacagtggaaggtggataacgccctccaatcgggtaactcccaggagagtgtcacagagcaggacagcaaggacagcacctacagcctcagcagcaccctgacgctgagcaaagcagactacgagaaacacaaagtctacgcctgcgaagtcacccatcagggcctgagctcgcccgtcacaaagagcttcaacaggggagagtgt

SEQ ID NO: 2003 - DNA, 660 bp, Artificial Sequence; identical to SEQ ID NO: 2002
  source: /note="Description of Artificial Sequence: Synthetic polynucleotide"

SEQ ID NO: 2004 - DNA, 660 bp, Artificial Sequence; identical to SEQ ID NO: 2002
  source: /note="Description of Artificial Sequence: Synthetic polynucleotide"

SEQ ID NO: 2005 - DNA, 660 bp, Artificial Sequence; identical to SEQ ID NO: 2002
  source: /note="Description of Artificial Sequence: Synthetic polynucleotide"

SEQ ID NO: 2006 - DNA, 660 bp, Artificial Sequence
  source: /note="Description of Artificial Sequence: Synthetic polynucleotide"
gacatcgtgatgacccagtctccagactccctggctgtgtctctgggcgagagggccaccatcaactgcaagtccagccagagtgttttatccagctccaacaataagaactacttagcttggtaccagcagaaaccaggacagcctcctaaactgctcatttactggacttctacccgagattccggggtccctgaccgattcagtggcagcgggtctgggacagatttcactctcaccatcaacagcctgcaggctgaagatgtggctgtttattactgtcagcaatattatcgtactccgtggacgttcggccaagggaccaaggtggaaatcaaacgaacggtggctgcaccatctgtcttcatcttcccgccatctgatgagcagttgaaatctggaactgcctctgttgtgtgcctgctgaataacttctatcccagagaggccaaagtacagtggaaggtggataacgccctccaatcgggtaactcccaggagagtgtcacagagcaggacagcaaggacagcacctacagcctcagcagcaccctgacgctgagcaaagcagactacgagaaacacaaagtctacgcctgcgaagtcacccatcagggcctgagctcgcccgtcacaaagagcttcaacaggggagagtgt

SEQ ID NO: 2007 - DNA, 660 bp, Artificial Sequence
  source: /note="Description of Artificial Sequence: Synthetic polynucleotide"
gacatcgtgatgacccagtctccagactccctggctgtgtctctgggcgagagggccaccatcaactgcaagtccagccagagtgttttatccagctccaacaataagaactacttagcttggtaccagcagaaaccaggacagcctcctaaactgctcatttactggacttctacccgagaatccggggtccctgaccgattcagtggcagcgggtctgggacagatttcactctcaccatcaacagcctgcaggctgaagatgtggctgtttattactgtcagcaatattatcgtactccgtggacgttcggccaagggaccaaggtggaaatcaaacgaacggtggctgcaccatctgtcttcatcttcccgccatctgatgagcagttgaaatctggaactgcctctgttgtgtgcctgctgaataacttctatcccagagaggccaaagtacagtggaaggtggataacgccctccaatcgggtaactcccaggagagtgtcacagagcaggacagcaaggacagcacctacagcctcagcagcaccctgacgctgagcaaagcagactacgagaaacacaaagtctacgcctgcgaagtcacccatcagggcctgagctcgcccgtcacaaagagcttcaacaggggagagtgt

SEQ ID NO: 2008 - DNA, 648 bp, Artificial Sequence
  source: /note="Description of Artificial Sequence: Synthetic polynucleotide"
cagtctgtgctgactcagccaccctcagcgtctgggacccccgggcagagggtcaccatctcttgttctggaagtagctccaacatcggaagtcaaactgtaaactggtaccagcacctcccaggaacggcccccaaactcctcatctatactaataatcagcggccctcaggggtccctgaccgattctctggctccaagtctggcacctcagcctcccttgccatcagtgggctccagtctgaggatgaggctgattatttctgtgcaacattcgatgaaagcctgagtggtccggtattcggcggagggaccaagctgaccgtcctaggtcagcccaaggctgccccctcggtcactctgttcccgccctcctctgaggagcttcaagccaacaaggccacactggtgtgtctcataagtgacttctacccgggagccgtgacagtggcctggaaggcagatagcagccccgtcaaggcgggagtggagaccaccacaccctccaaacaaagcaacaacaagtacgcggccagcagctatctgagcctgacgcctgagcagtggaagtcccacagaagctacagctgccaggtcacgcatgaagggagcaccgtggagaagacagtggcccctacagaatgttca

SEQ ID NO: 2009 - DNA, 648 bp, Artificial Sequence
  source: /note="Description of Artificial Sequence: Synthetic polynucleotide"
cagtctgtgctgactcagccaccctcagcgtctgggacccccgggcagagggtcaccatctcttgttctggaagtagctccaacatcggaagtcaaactgtaaactggtaccagcacctcccaggaacggcccccaaactcctcatctatactaataatcagcggccctcaggggtccctgaccgattctctggctccaagtctggcacctcagcctcccttgccatcagtgggctccagtctgaggatgaggctgattatttctgtgcaacattcgatgaaagcctgcaaggtccggtattcggcggagggaccaagctgaccgtcctaggtcagcccaaggctgccccctcggtcactctgttcccgccctcctctgaggagcttcaagccaacaaggccacactggtgtgtctcataagtgacttctacccgggagccgtgacagtggcctggaaggcagatagcagccccgtcaaggcgggagtggagaccaccacaccctccaaacaaagcaacaacaagtacgcggccagcagctatctgagcctgacgcctgagcagtggaagtcccacagaagctacagctgccaggtcacgcatgaagggagcaccgtggagaagacagtggcccctacagaatgttca

SEQ ID NO: 2010 - DNA, 648 bp, Artificial Sequence
  source: /note="Description of Artificial Sequence: Synthetic polynucleotide"
cagtctgtgctgactcagccaccctcagcgtctgggacccccgggcagagggtcaccatctcttgttctggaagtagctccaacatcggaagtaattatgtaaactggtaccagcacctcccaggaacggcccccaaactcctcatctatactaataatcagcggccctcaggggtccctgaccgattctctggctccaagtctggcacctcagcctcccttgccatcagtgggctccagtctgaggatgaggctgattatttctgtgcaacattcgatgaaagcctgagtggtccggtattcggcggagggaccaagctgaccgtcctaggtcagcccaaggctgccccctcggtcactctgttcccgccctcctctgaggagcttcaagccaacaaggccacactggtgtgtctcataagtgacttctacccgggagccgtgacagtggcctggaaggcagatagcagccccgtcaaggcgggagtggagaccaccacaccctccaaacaaagcaacaacaagtacgcggccagcagctatctgagcctgacgcctgagcagtggaagtcccacagaagctacagctgccaggtcacgcatgaagggagcaccgtggagaagacagtggcccctacagaatgttca

SEQ ID NO: 2011 - DNA, 648 bp, Artificial Sequence
  source: /note="Description of Artificial Sequence: Synthetic polynucleotide"
cagtctgtgctgactcagccaccctcagcgtctgggacccccgggcagagggtcaccatctcttgttctggaagtagctccaacatcggaagtaattatgtaaactggtaccagcacctcccaggaacggcccccaaactcctcatctatactaataatcagcggccctcaggggtccctgaccgattctctggctccaagtctggcacctcagcctcccttgccatcagtgggctccagtctgaggatgaggctgattatttctgtgcaacattcgatgaaagcctgcaaggtccggtattcggcggagggaccaagctgaccgtcctaggtcagcccaaggctgccccctcggtcactctgttcccgccctcctctgaggagcttcaagccaacaaggccacactggtgtgtctcataagtgacttctacccgggagccgtgacagtggcctggaaggcagatagcagccccgtcaaggcgggagtggagaccaccacaccctccaaacaaagcaacaacaagtacgcggccagcagctatctgagcctgacgcctgagcagtggaagtcccacagaagctacagctgccaggtcacgcatgaagggagcaccgtggagaagacagtggcccctacagaatgttca

SEQ ID NO: 2012 - DNA, 648 bp, Artificial Sequence
  source: /note="Description of Artificial Sequence: Synthetic polynucleotide"
cagtctgtgctgactcagccaccctcagcgtctgggacccccgggcagagggtcaccatctcttgttctggaagtagctccaacatcggaagtcaaactgtaaactggtaccagcacctcccaggaacggcccccaaactcctcatctatactaataatcagcggccctcaggggtccctgaccgattctctggctccaagtctggcacctcagcctcccttgccatcagtgggctccagtctgaggatgaggctgattatttctgtgcaacattcgatgacagcctgaatggtccggtattcggcggagggaccaagctgaccgtcctaggtcagcccaaggctgccccctcggtcactctgttcccgccctcctctgaggagcttcaagccaacaaggccacactggtgtgtctcataagtgacttctacccgggagccgtgacagtggcctggaaggcagatagcagccccgtcaaggcgggagtggagaccaccacaccctccaaacaaagcaacaacaagtacgcggccagcagctatctgagcctgacgcctgagcagtggaagtcccacagaagctacagctgccaggtcacgcatgaagggagcaccgtggagaagacagtggcccctacagaatgttca

SEQ ID NO: 2013 - DNA, 648 bp, Artificial Sequence
  source: /note="Description of Artificial Sequence: Synthetic polynucleotide"
cagtctgtgctgactcagccaccctcagcgtctgggacccccgggcagagggtcaccatctcttgttctggaagtagctccaacatcggaagtaattatgtaaactggtaccagcacctcccaggaacggcccccaaactcctcatctatactaataatcagcggccctcaggggtccctgaccgattctctggctccaagtctggcacctcagcctcccttgccatcagtgggctccagtctgaggatgaggctgattatttctgtgcaacattcgatgacagcctgaatggtccggtattcggcggagggaccaagctgaccgtcctaggtcagcccaaggctgccccctcggtcactctgttcccgccctcctctgaggagcttcaagccaacaaggccacactggtgtgtctcataagtgacttctacccgggagccgtgacagtggcctggaaggcagatagcagccccgtcaaggcgggagtggagaccaccacaccctccaaacaaagcaacaacaagtacgcggccagcagctatctgagcctgacgcctgagcagtggaagtcccacagaagctacagctgccaggtcacgcatgaagggagcaccgtggagaagacagtggcccctacagaatgttca

SEQ ID NO: 2014 - DNA, 648 bp, Artificial Sequence
  source: /note="Description of Artificial Sequence: Synthetic polynucleotide"
cagtctgtgctgactcagccaccctcagcgtctgggacccccgggcagagggtcaccatctcttgttctggaagtagctccaacatcggaagtaatactgtaaactggtaccagcacctcccaggaacggcccccaaactcctcatctatactaataatcagcggccctcaggggtccctgaccgattctctggctccaagtctggcacctcagcctcccttgccatcagtgggctccagtctgaggatgaggctgattatttctgtgcaacattcgatgaaagcctgaatggtccggtattcggcggagggaccaagctgaccgtcctaggtcagcccaaggctgccccctcggtcactctgttcccgccctcctctgaggagcttcaagccaacaaggccacactggtgtgtctcataagtgacttctacccgggagccgtgacagtggcctggaaggcagatagcagccccgtcaaggcgggagtggagaccaccacaccctccaaacaaagcaacaacaagtacgcggccagcagctatctgagcctgacgcctgagcagtggaagtcccacagaagctacagctgccaggtcacgcatgaagggagcaccgtggagaagacagtggcccctacagaatgttca

SEQ ID NO: 2015 - DNA, 648 bp, Artificial Sequence
  source: /note="Description of Artificial Sequence: Synthetic polynucleotide"
cagtctgtgctgactcagccaccctcagcgtctgggacccccgggcagagggtcaccatctcttgttctggaagtagctccaacatcggaagtaatactgtaaactggtaccagcacctcccaggaacggcccccaaactcctcatctatactaataatcagcggccctcaggggtccctgaccgattctctggctccaagtctggcacctcagcctcccttgccatcagtgggctccagtctgaggatgaggctgattatttctgtgcaacattcgatgacagcctgcaaggtccggtattcggcggagggaccaagctgaccgtcctaggtcagcccaaggctgccccctcggtcactctgttcccgccctcctctgaggagcttcaagccaacaaggccacactggtgtgtctcataagtgacttctacccgggagccgtgacagtggcctggaaggcagatagcagccccgtcaaggcgggagtggagaccaccacaccctccaaacaaagcaacaacaagtacgcggccagcagctatctgagcctgacgcctgagcagtggaagtcccacagaagctacagctgccaggtcacgcatgaagggagcaccgtggagaagacagtggcccctacagaatgttca

SEQ ID NO: 2016 - DNA, 648 bp, Artificial Sequence
  source: /note="Description of Artificial Sequence: Synthetic polynucleotide"
cagtctgtgctgactcagccaccctcagcgtctgggacccccgggcagagggtcaccatctcttgttctggaagtagctccaacatcggaagtaatactgtaaactggtaccagcacctcccaggaacggcccccaaactcctcatctatactaataatcagcggccctcaggggtccctgaccgattctctggctccaagtctggcacctcagcctcccttgccatcagtgggctccagtctgaggatgaggctgattatttctgtgcaacattcgatgacagcctgagtggtccggtattcggcggagggaccaagctgaccgtcctaggtcagcccaaggctgccccctcggtcactctgttcccgccctcctctgaggagcttcaagccaacaaggccacactggtgtgtctcataagtgacttctacccgggagccgtgacagtggcctggaaggcagatagcagccccgtcaaggcgggagtggagaccaccacaccctccaaacaaagcaacaacaagtacgcggccagcagctatctgagcctgacgcctgagcagtggaagtcccacagaagctacagctgccaggtcacgcatgaagggagcaccgtggagaagacagtggcccctacagaatgttca

SEQ ID NO: 2017 - DNA, 648 bp, Artificial Sequence
  source: /note="Description of Artificial Sequence: Synthetic polynucleotide"
cagtctgtgctgactcagccaccctcagcgtctgggacccccgggcagagggtcaccatctcttgttctggaagtagctccaacatcggaagtaatactgtaaactggtaccagcacctcccaggaacggcccccaaactcctcatctatactaataatcagcggccctcaggggtccctgaccgattctctggctccaagtctggcacctcagcctcccttgccatcagtgggctccagtctgaggatgaggctgattatttctgtgcaacattcgatgacagcctgaatgctccggtattcggcggagggaccaagctgaccgtcctaggtcagcccaaggctgccccctcggtcactctgttcccgccctcctctgaggagcttcaagccaacaaggccacactggtgtgtctcataagtgacttctacccgggagccgtgacagtggcctggaaggcagatagcagccccgtcaaggcgggagtggagaccaccacaccctccaaacaaagcaacaacaagtacgcggccagcagctatctgagcctgacgcctgagcagtggaagtcccacagaagctacagctgccaggtcacgcatgaagggagcaccgtggagaagacagtggcccctacagaatgttca

SEQ ID NO: 2018 - DNA, 648 bp, Artificial Sequence
  source: /note="Description of Artificial Sequence: Synthetic polynucleotide"
cagtctgtgctgactcagccaccctcagcgtctgggacccccgggcagagggtcaccatctcttgttctggaagtagctccaacatcggaagtaatactgtaaactggtaccagcacctcccaggaacggcccccaaactcctcatctatactaataatcagcggccctcaggggtccctgaccgattctctggctccaagtctggcacctcagcctcccttgccatcagtgggctccagtctgaggatgaggctgattatttctgtgcaacattcgatagcagcctgaatggtccggtattcggcggagggaccaagctgaccgtcctaggtcagcccaaggctgccccctcggtcactctgttcccgccctcctctgaggagcttcaagccaacaaggccacactggtgtgtctcataagtgacttctacccgggagccgtgacagtggcctggaaggcagatagcagccccgtcaaggcgggagtggagaccaccacaccctccaaacaaagcaacaacaagtacgcggccagcagctatctgagcctgacgcctgagcagtggaagtcccacagaagctacagctgccaggtcacgcatgaagggagcaccgtggagaagacagtggcccctacagaatgttca

SEQ ID NO: 2019 - DNA, 648 bp, Artificial Sequence
  source: /note="Description of Artificial Sequence: Synthetic polynucleotide"
cagtctgtgctgactcagccaccctcagcgtctgggacccccgggcagagggtcaccatctcttgttctggaagtagctccaacatcggaagtaattatgtaaactggtaccagcacctcccaggaacggcccccaaactcctcatctatactaataatcagcggccctcaggggtccctgaccgattctctggctccaagtctggcacctcagcctcccttgccatcagtgggctccagtctgaggatgaggctgattatttctgtgcaacattcgatagcagcctgaatgctccggtattcggcggagggaccaagctgaccgtcctaggtcagcccaaggctgccccctcggtcactctgttcccgccctcctctgaggagcttcaagccaacaaggccacactggtgtgtctcataagtgacttctacccgggagccgtgacagtggcctggaaggcagatagcagccccgtcaaggcgggagtggagaccaccacaccctccaaacaaagcaacaacaagtacgcggccagcagctatctgagcctgacgcctgagcagtggaagtcccacagaagctacagctgccaggtcacgcatgaagggagcaccgtggagaagacagtggcccctacagaatgttca

SEQ ID NO: 2020 - DNA, 648 bp, Artificial Sequence; identical to SEQ ID NO: 2019
  source: /note="Description of Artificial Sequence: Synthetic polynucleotide"

SEQ ID NO: 2021 - DNA, 648 bp, Artificial Sequence; identical to SEQ ID NO: 2008
  source: /note="Description of Artificial Sequence: Synthetic polynucleotide"

SEQ ID NO: 2022 - DNA, 642 bp, Artificial Sequence
  source: /note="Description of Artificial Sequence: Synthetic polynucleotide"
gacatccagatgacccagtctccatcctccctgtctgcatctataggagacagagtcaccatcacttgccgggcaagtcaggaccttagaaattatttaggctggtatcaacagaaaccagggaaagcccctaagcgcctgatctatggtgcatccagtttgcaaagtggggtcccttcaaggttcagcggcagtggatctgggacagaattcactctcacaatcagcagcctgcagcctgaagatttcgcaacttattactgtctacagcataataattaccccttcactttcggccaagggaccaaagtggatatcaaacgaacggtggctgcaccatctgtcttcatcttcccgccatctgatgagcagttgaaatctggaactgcctctgttgtgtgcctgctgaataacttctatcccagagaggccaaagtacagtggaaggtggataacgccctccaatcgggtaactcccaggagagtgtcacagagcaggacagcaaggacagcacctacagcctcagcagcaccctgacgctgagcaaagcagactacgagaaacacaaagtctacgcctgcgaagtcacccatcagggcctgagctcgcccgtcacaaagagcttcaacaggggagagtgt

SEQ ID NO: 2023 - DNA, 642 bp, Artificial Sequence; identical to SEQ ID NO: 1906
  source: /note="Description of Artificial Sequence: Synthetic polynucleotide"

SEQ ID NO: 2024 - DNA, 648 bp, Artificial Sequence
  source: /note="Description of Artificial Sequence: Synthetic polynucleotide"
cagtctgtgctgactcagccaccctcagcgtctgggacccccgggcagagggtcaccatctcttgttctggaagtagctccaacatcggaagtaatactgtaaactggtaccagcaactcccaggaacggcccccaaactcctcatctatactaataatcagcggccctcaggggtccctgaccgattctctggctccaagtctggcacctcagcctcccttgccatcagtgggctccagtctgaggatgaggctgattatttctgtgcaacattcgatagcagcctgagtggtccggtattcggcggagggaccaagctgaccgtcctaggtcagcccaaggctgccccctcggtcactctgttcccgccctcctctgaggagcttcaagccaacaaggccacactggtgtgtctcataagtgacttctacccgggagccgtgacagtggcctggaaggcagatagcagccccgtcaaggcgggagtggagaccaccacaccctccaaacaaagcaacaacaagtacgcggccagcagctatctgagcctgacgcctgagcagtggaagtcccacagaagctacagctgccaggtcacgcatgaagggagcaccgtggagaagacagtggcccctacagaatgttca

SEQ ID NO: 2025 - DNA, 642 bp, Artificial Sequence
  source: /note="Description of Artificial Sequence: Synthetic polynucleotide"
gacatccagctgacccagtctccatcctccctgtctgcatctgtaggagacagagtcactatcacttgccgggcaagtcagaccattagcaggtttttaaattggtatcagcagaaacctgggaaagcccctgagctcctgatctatgttgcatccagtttgcaaagtggggtcccatcaagattcagtggcagtggttctgggacagatttcactctcaccatcagcagtctgcaacctgaagattttgcaacttactactgtcaacagagttacagtaccctgatcagttttggccaggggaccaagctggagatcacacgaacggtggctgcaccatctgtcttcatcttcccgccatctgatgagcagttgaaatctggaactgcctctgttgtgtgcctgctgaataacttctatcccagagaggccaaagtacagtggaaggtggataacgccctccaatcgggtaactcccaggagagtgtcacagagcaggacagcaaggacagcacctacagcctcagcagcaccctgacgctgagcaaagcagactacgagaaacacaaagtctacgcctgcgaagtcacccatcagggcctgagctcgcccgtcacaaagagcttcaacaggggagagtgt

SEQ ID NO: 2026 - DNA, 648 bp, Artificial Sequence
  source: /note="Description of Artificial Sequence: Synthetic polynucleotide"
cagtctgtgttgacgcagccgccctcagtgtctgcggccccaggacagaaggtcaccatctcctgctctggaagcagctccaacattggaaataattatgtatcctggtatgagcagttcccaggaacagcccccaaactcctcatttatgacaataataagcgaccctcagggattcctgaccgattctctggctccaagtctggcacgtcagccaccctgggcatcaccggactccagactggggacgaggccgattattactgcggaacatgggatagcagcctgagtgctgtggtattcggcggagggaccaaactgaccgtcctaggtcagcccaaggctgccccctcggtcactctgttcccgccctcctctgaggagcttcaagccaacaaggccacactggtgtgtctcataagtgacttctacccgggagccgtgacagtggcctggaaggcagatagcagccccgtcaaggcgggagtggagaccaccacaccctccaaacaaagcaacaacaagtacgcggccagcagctatctgagcctgacgcctgagcagtggaagtcccacagaagctacagctgccaggtcacgcatgaagggagcaccgtggagaagacagtggcccctacagaatgttca

SEQ ID NO: 2027 - DNA, 642 bp, Artificial Sequence
  source: /note="Description of Artificial Sequence: Synthetic polynucleotide"
gacatccagctgacccagtctccatcctccctgtctgcatctgtaggagacagagtcactatcacttgccgggcaagtcagaccattagcaggtttttaaattggtatcagcagaaacctgggaaagcccctgagctcctgatctatgttgcatccagtttgcaaagtggggtcccatcaagattcagtggcagtggttctgggacagatttcactctcaccatcagcagtctgcaacctgaagattttgcaacttactactgtcaacagagttacagtaccctgatcagttttggccaggggaccaagctggagatcaaacgaacggtggctgcaccatctgtcttcatcttcccgccatctgatgagcagttgaaatctggaactgcctctgttgtgtgcctgctgaataacttctatcccagagaggccaaagtacagtggaaggtggataacgccctccaatcgggtaactcccaggagagtgtcacagagcaggacagcaaggacagcacctacagcctcagcagcaccctgacgctgagcaaagcagactacgagaaacacaaagtctacgcctgcgaagtcacccatcagggcctgagctcgcccgtcacaaagagcttcaacaggggagagtgt

SEQ ID NO: 2028 - DNA, 642 bp, Artificial Sequence; identical to SEQ ID NO: 2027
  source: /note="Description of Artificial Sequence: Synthetic polynucleotide"

SEQ ID NO: 2029 - DNA, 642 bp, Artificial Sequence; identical to SEQ ID NO: 2025
  source: /note="Description of Artificial Sequence: Synthetic polynucleotide"

SEQ ID NO: 2030 - DNA, 642 bp, Artificial Sequence
  source: /note="Description of Artificial Sequence: Synthetic polynucleotide"
gacatccagctgacccagtctccatcctccctgtctgcatctgtaggagacagagtcactatcacttgccgggcaagtcagaccattagcaggtttttaaattggtatcagcagaaacctgggaaagcccctaagctcctgatctatgttgcatccagtttgcaaagtggggtcccatcaagattcagtggcagtggttctgggacagatttcactctcaccatcagcagtctgcaacctgaagattttgcaacttactactgtcaacagagttacagtaccctgatcagttttggccaggggaccaagctggagatcaaacgaacggtggctgcaccatctgtcttcatcttcccgccatctgatgagcagttgaaatctggaactgcctctgttgtgtgcctgctgaataacttctatcccagagaggccaaagtacagtggaaggtggataacgccctccaatcgggtaactcccaggagagtgtcacagagcaggacagcaaggacagcacctacagcctcagcagcaccctgacgctgagcaaagcagactacgagaaacacaaagtctacgcctgcgaagtcacccatcagggcctgagctcgcccgtcacaaagagcttcaacaggggagagtgt

SEQ ID NO: 2031 - DNA, 642 bp, Artificial Sequence; identical to SEQ ID NO: 2027
  source: /note="Description of Artificial Sequence: Synthetic polynucleotide"

SEQ ID NO: 2032 - DNA, 642 bp, Artificial Sequence; identical to SEQ ID NO: 2027
  source: /note="Description of Artificial Sequence: Synthetic polynucleotide"

SEQ ID NO: 2033 - DNA, 648 bp, Artificial Sequence
  source: /note="Description of Artificial Sequence: Synthetic polynucleotide"
cagtctgtgttgacgcagccgccctcagtgtctgcggccccaggacagaaggtcaccatctcctgctctggaagcagctccaacattggaaataattatgtatcctggtatcagcagctcccaggaacagcccccaaactcctcatttatgacaataataagcgaccctcagggattcctgaccgattctctggctccaagtctggcacgtcagccaccctgggcatcaccggactccagactggggacgaggccgattattactgcggaacatgggatagcagcctgagtgctgtggtattcggcggagggaccaaactgaccgtcctaggtcagcccaaggctgccccctcggtcactctgttcccgccctcctctgaggagcttcaagccaacaaggccacactggtgtgtctcataagtgacttctacccgggagccgtgacagtggcctggaaggcagatagcagccccgtcaaggcgggagtggagaccaccacaccctccaaacaaagcaacaacaagtacgcggccagcagctatctgagcctgacgcctgagcagtggaagtcccacagaagctacagctgccaggtcacgcatgaagggagcaccgtggagaagacagtggcccctacagaatgttca

SEQ ID NO: 2034 - DNA, 648 bp, Artificial Sequence; identical to SEQ ID NO: 2033
  source: /note="Description of Artificial Sequence: Synthetic polynucleotide"

SEQ ID NO: 2035 - DNA, 648 bp, Artificial Sequence; identical to SEQ ID NO: 2026
  source: /note="Description of Artificial Sequence: Synthetic polynucleotide"

SEQ ID NO: 2036 - DNA, 648 bp, Artificial Sequence
  source: /note="Description of Artificial Sequence: Synthetic polynucleotide"
cagtctgtgttgacgcagccgccctcagtgtctgcggccccaggacagaaggtcaccatctcctgctctggaagcagctccaacattggaaataattatgtatcctggtatcagcagctcccaggaacagcccccaaactcctcatttatgacaataataagcgaccctcagggattcctgaccgattctctggctccaagtctggcacgtcagccaccctggccatcaccggactccagactggggacgaggccgattattactgcggaacattcgaaagcagcctgagtgctgtggtattcggcggagggaccaaactgaccgtcctaggtcagcccaaggctgccccctcggtcactctgttcccgccctcctctgaggagcttcaagccaacaaggccacactggtgtgtctcataagtgacttctacccgggagccgtgacagtggcctggaaggcagatagcagccccgtcaaggcgggagtggagaccaccacaccctccaaacaaagcaacaacaagtacgcggccagcagctatctgagcctgacgcctgagcagtggaagtcccacagaagctacagctgccaggtcacgcatgaagggagcaccgtggagaagacagtggcccctacagaatgttca

SEQ ID NO: 2037 - DNA, 648 bp, Artificial Sequence
  source: /note="Description of Artificial Sequence: Synthetic polynucleotide"
cagtctgtgttgacgcagccgccctcagtgtctgcggccccaggacagaaggtcaccatctcctgctctggaagcagctccaacattggaaataattatgtatcctggtatcagcagctcccaggaacagcccccaaactcctcatttatgacaataataagcgaccctcagggattcctgaccgattctctggctccaagtctggcacgtcagccaccctggccatcaccggactccagactggggacgaggccgattattactgcggaacatgggatagcagcctgagtgctgtggtattcggcggagggaccaaactgaccgtcctaggtcagcccaaggctgccccctcggtcactctgttcccgccctcctctgaggagcttcaagccaacaaggccacactggtgtgtctcataagtgacttctacccgggagccgtgacagtggcctggaaggcagatagcagccccgtcaaggcgggagtggagaccaccacaccctccaaacaaagcaacaacaagtacgcggccagcagctatctgagcctgacgcctgagcagtggaagtcccacagaagctacagctgccaggtcacgcatgaagggagcaccgtggagaagacagtggcccctacagaatgttca

SEQ ID NO: 2038 - DNA, 648 bp, Artificial Sequence; identical to SEQ ID NO: 2037
  source: /note="Description of Artificial Sequence: Synthetic polynucleotide"

SEQ ID NO: 2039 - DNA, 648 bp, Artificial Sequence; identical to SEQ ID NO: 2033
  source: /note="Description of Artificial Sequence: Synthetic polynucleotide"

SEQ ID NO: 2040 - DNA, 648 bp, Artificial Sequence; identical to SEQ ID NO: 2036
  source: /note="Description of Artificial Sequence: Synthetic polynucleotide"

SEQ ID NO: 2041 - DNA, 642 bp, Artificial Sequence
  source: /note="Description of Artificial Sequence: Synthetic polynucleotide"
gacatccagctgacccagtctccatcctccctgtctgcatctgtaggagacagagtcactatcacttgccgggcaagtcagaccattagcaggtttttaaattggtatcagcagaaacctgggaaagcccctaagctcctgatctatgttgcatccagtttgcaaagtggggtcccatcaagattcagtggcagtggttctgggacagatttcactctcaccatcagcagtctgcaacctgaagattttgcaacttactactgtcaacagagttacagtaccctgctcagttttggccaggggaccaagctggagatcaaacgaacggtggctgcaccatctgtcttcatcttcccgccatctgatgagcagttgaaatctggaactgcctctgttgtgtgcctgctgaataacttctatcccagagaggccaaagtacagtggaaggtggataacgccctccaatcgggtaactcccaggagagtgtcacagagcaggacagcaaggacagcacctacagcctcagcagcaccctgacgctgagcaaagcagactacgagaaacacaaagtctacgcctgcgaagtcacccatcagggcctgagctcgcccgtcacaaagagcttcaacaggggagagtgt

SEQ ID NO: 2042 - DNA, 1374 bp, Artificial Sequence
  source: /note="Description of Artificial Sequence: Synthetic polynucleotide"
cagatgcaggtggtgcagtctggggctgaggtgaagaagcctggggcctcagtgaaggtctcctgcaaggcttccggatacaccttcaccggctactatatgcattgggtgcgacaggcccctggacaagggcttgagtggatgggatggatcaaccctaacagtggtggcacaaactatgcacagaagtttcagggcagggtcaccatgaccagggacacgtccatcagtacagcctacatggagctgagcaggctgaggtctgacgacacggccgtgtattactgtgcgagagggggggattacgtttgggggacttatcggcctcactactactacggtatggacgtctggggccaagggaccacggtcaccgtctcctcagcctccaccaagggcccatcggtcttccccctggcaccctcctccaagagcacctctgggggcacagcggccctgggctgcctggtcaaggactacttccccgaaccggtgacggtgtcgtggaactcaggcgccctgaccagcggcgtgcacaccttcccggctgtcctacagtcctcaggactctactccctcagcagcgtggtgaccgtgccctccagcagcttgggcacccagacctacatctgcaacgtgaatcacaagcccagcaacaccaaggtggacaagaaagttgagcccaaatcttgtgacaaaactcacacatgcccaccgtgcccagcacctgaactcctggggggaccgtcagtcttcctcttccccccaaaacccaaggacaccctcatgatctcccggacccctgaggtcacatgcgtggtggtggacgtgagccacgaagaccctgaggtcaagttcaactggtacgtggacggcgtggaggtgcataatgccaagacaaagccgtgtgaggagcagtacggcagcacgtaccgttgtgtcagcgtcctcaccgtcctgcaccaggactggctgaatggcaaggagtacaagtgcaaggtctccaacaaagccctcccagcccccatcgagaaaaccatctccaaagccaaagggcagccccgagaaccacaggtgtacaccctgcccccatcccgggaggagatgaccaagaaccaggtcagcctgacctgcctggtcaaaggcttctatcccagcgacatcgccgtggagtgggagagcaatgggcagccggagaacaactacaagaccacgcctcccgtgctggactccgacggctccttcttcctctatagcaagctcaccgtggacaagagcaggtggcagcaggggaacgtcttctcatgctccgtgatgcatgaggctctgcacaaccactacacgcagaagagcctctccctgtctccgggtaaa

SEQ ID NO: 2043 - DNA, 1353 bp, Artificial Sequence
  source: /note="Description of Artificial Sequence: Synthetic polynucleotide"
caggtgcagctggtggagtctgggggaggcgtggtccagcctgggaggtccctgagactctcctgtgcagcgtctggattcactttcagtaactttggcatgcactgggtccgccaggctccaggcaaggggctggagtgggtggcagttatatggtatgatggaagtaatgaaaactatgcagactccgtgaagggccgattcaccatctccagagacaattccaagaatacgctgtatctgcacatgaacagcctgagagtcgcggacacggctgtgtattattgtgcgcgagatgggacgatctttggagtggtcttgggggactactggggccagggaaccctggtcaccgtctcctcagcctccaccaagggcccatcggtcttccccctggcaccctcctccaagagcacctctgggggcacagcggccctgggctgcctggtcaaggactacttccccgaaccggtgacggtgtcgtggaactcaggcgccctgaccagcggcgtgcacaccttcccggctgtcctacagtcctcaggactctactccctcagcagcgtggtgaccgtgccctccagcagcttgggcacccagacctacatctgcaacgtgaatcacaagcccagcaacaccaaggtggacaagaaagttgagcccaaatcttgtgacaaaactcacacatgcccaccgtgcccagcacctgaactcctggggggaccgtcagtcttcctcttccccccaaaacccaaggacaccctcatgatctcccggacccctgaggtcacatgcgtggtggtggacgtgagccacgaagaccctgaggtcaagttcaactggtacgtggacggcgtggaggtgcataatgccaagacaaagccgtgtgaggagcagtacggcagcacgtaccgttgtgtcagcgtcctcaccgtcctgcaccaggactggctgaatggcaaggagtacaagtgcaaggtctccaacaaagccctcccagcccccatcgagaaaaccatctccaaagccaaagggcagccccgagaaccacaggtgtacaccctgcccccatcccgggaggagatgaccaagaaccaggtcagcctgacctgcctggtcaaaggcttctatcccagcgacatcgccgtggagtgggagagcaatgggcagccggagaacaactacaagaccacgcctcccgtgctggactccgacggctccttcttcctctatagcaagctcaccgtggacaagagcaggtggcagcaggggaacgtcttctcatgctccgtgatgcatgaggctctgcacaaccactacacgcagaagagcctctccctgtctccgggtaaa

SEQ ID NO: 2044 - DNA, 1353 bp, Artificial Sequence
  source: /note="Description of Artificial Sequence: Synthetic polynucleotide"
caggtgcagctggtggagtctgggggaggcgtggtccagcctgggaggtccctgagactctcctgtgcagcgtctggattcaccttcagttactttggcatgcactgggtccgccaggctccaggcaaggggctggagtgggtggcagttatatggtatgatggaagtaataaatactatgcagactccgtgaagggccgcttcaccatctccagagacaattccaagaacacgctgtatctgcaaatgaacagcctgagagccgaggacacggctgtgtattactgtgcgcgagatgggacgatttttggagtgctcttgggggactactggggccagggaaccctggtcaccgtctcctcagcctccaccaagggcccatcggtcttccccctggcaccctcctccaagagcacctctgggggcacagcggccctgggctgcctggtcaaggactacttccccgaaccggtgacggtgtcgtggaactcaggcgccctgaccagcggcgtgcacaccttcccggctgtcctacagtcctcaggactctactccctcagcagcgtggtgaccgtgccctccagcagcttgggcacccagacctacatctgcaacgtgaatcacaagcccagcaacaccaaggtggacaagaaagttgagcccaaatcttgtgacaaaactcacacatgcccaccgtgcccagcacctgaactcctggggggaccgtcagtcttcctcttccccccaaaacccaaggacaccctcatgatctcccggacccctgaggtcacatgcgtggtggtggacgtgagccacgaagaccctgaggtcaagttcaactggtacgtggacggcgtggaggtgcataatgccaagacaaagccgtgtgaggagcagtacggcagcacgtaccgttgtgtcagcgtcctcaccgtcctgcaccaggactggctgaatggcaaggagtacaagtgcaaggtctccaacaaagccctcccagcccccatcgagaaaaccatctccaaagccaaagggcagccccgagaaccacaggtgtacaccctgcccccatcccgggaggagatgaccaagaaccaggtcagcctgacctgcctggtcaaaggcttctatcccagcgacatcgccgtggagtgggagagcaatgggcagccggagaacaactacaagaccacgcctcccgtgctggactccgacggctccttcttcctctatagcaagctcaccgtggacaagagcaggtggcagcaggggaacgtcttctcatgctccgtgatgcatgaggctctgcacaaccactacacgcagaagagcctctccctgtctccgggtaaa

SEQ ID NO: 2045 - DNA, 1350 bp, Artificial Sequence
  source: /note="Description of Artificial Sequence: Synthetic polynucleotide"
caggtgcaactggtggagtctgggggaggcgtggtccagcctgggaggtccctgagactctcctgtgcagcgtctggattcaccttcagtagctatggcatgcactgggtccgccaggctccaggcaaggggctggagtgggtggcagttatatggtatgatggaagtaataaatactatgcagactccgtgaagggccgattcaccatctccagcgacaattccaagaacacgctgtatctgcaaatgaacagcctgagagccgaggacacggctgtgtattactgtgcgagagataggacgatttttggagtggttcttgactactggggccagggaaccctggtcaccgtctcctcagcctccaccaagggcccatcggtcttccccctggcaccctcctccaagagcacctctgggggcacagcggccctgggctgcctggtcaaggactacttccccgaaccggtgacggtgtcgtggaactcaggcgccctgaccagcggcgtgcacaccttcccggctgtcctacagtcctcaggactctactccctcagcagcgtggtgaccgtgccctccagcagcttgggcacccagacctacatctgcaacgtgaatcacaagcccagcaacaccaaggtggacaagaaagttgagcccaaatcttgtgacaaaactcacacatgcccaccgtgcccagcacctgaactcctggggggaccgtcagtcttcctcttccccccaaaacccaaggacaccctcatgatctcccggacccctgaggtcacatgcgtggtggtggacgtgagccacgaagaccctgaggtcaagttcaactggtacgtggacggcgtggaggtgcataatgccaagacaaagccgtgtgaggagcagtacggcagcacgtaccgttgtgtcagcgtcctcaccgtcctgcaccaggactggctgaatggcaaggagtacaagtgcaaggtctccaacaaagccctcccagcccccatcgagaaaaccatctccaaagccaaagggcagccccgagaaccacaggtgtacaccctgcccccatcccgggaggagatgaccaagaaccaggtcagcctgacctgcctggtcaaaggcttctatcccagcgacatcgccgtggagtgggagagcaatgggcagccggagaacaactacaagaccacgcctcccgtgctggactccgacggctccttcttcctctatagcaagctcaccgtggacaagagcaggtggcagcaggggaacgtcttctcatgctccgtgatgcatgaggctctgcacaaccactacacgcagaagagcctctccctgtctccgggtaaa

SEQ ID NO: 2046 - DNA, 1359 bp, Artificial Sequence
  source: /note="Description of Artificial Sequence: Synthetic polynucleotide"
caggtgccgctggtgcagtctggggctgaggtgaagaagcctggggcctcagtgaaggtctcctgcaaggcttctggatacaccttcaccggctactatatccactgggtgcgacaggcccctggacaagggcttgagtggatggggtggatcaaccctgacagtggtggcacagactattcacagaggtttcagggcaggttcaccatgaccagggacacgtccatcagcacagcctacatggaactgaacaggctgagatctgacgacacggccgtgtattactgtgcgagagaggccacgatttttggaatggttattgtaccgtttgactactggggccagggaaccctggtcaccgtctcctcagcctccaccaagggcccatcggtcttccccctggcaccctcctccaagagcacctctgggggcacagcggccctgggctgcctggtcaaggactacttccccgaaccggtgacggtgtcgtggaactcaggcgccctgaccagcggcgtgcacaccttcccggctgtcctacagtcctcaggactctactccctcagcagcgtggtgaccgtgccctccagcagcttgggcacccagacctacatctgcaacgtgaatcacaagcccagcaacaccaaggtggacaagaaagttgagcccaaatcttgtgacaaaactcacacatgcccaccgtgcccagcacctgaactcctggggggaccgtcagtcttcctcttccccccaaaacccaaggacaccctcatgatctcccggacccctgaggtcacatgcgtggtggtggacgtgagccacgaagaccctgaggtcaagttcaactggtacgtggacggcgtggaggtgcataatgccaagacaaagccgtgtgaggagcagtacggcagcacgtaccgttgtgtcagcgtcctcaccgtcctgcaccaggactggctgaatggcaaggagtacaagtgcaaggtctccaacaaagccctcccagcccccatcgagaaaaccatctccaaagccaaagggcagccccgagaaccacaggtgtacaccctgcccccatcccgggaggagatgaccaagaaccaggtcagcctgacctgcctggtcaaaggcttctatcccagcgacatcgccgtggagtgggagagcaatgggcagccggagaacaactacaagaccacgcctcccgtgctggactccgacggctccttcttcctctatagcaagctcaccgtggacaagagcaggtggcagcaggggaacgtcttctcatgctccgtgatgcatgaggctctgcacaaccactacacgcagaagagcctctccctgtctccgggtaaa

SEQ ID NO: 2047 - DNA, 1359 bp, Artificial Sequence
  source: /note="Description of Artificial Sequence: Synthetic polynucleotide"
caggtgccgctggtgcagtctggggctgaggtgaagaagcctggggcctcagtgaaggtctcctgcaaggcttctggatacaccttcaccggctactatatccactgggtgcgacaggcccctggacaaggacttgagtggatggggtggatcaaccctgacagtggtggcacagactattcacagaggtttcagggcaggttcaccatgaccagggacacgtccatcagcacagcctacatggaactgagcaggctgagatctgacgacacggccgtgtattactgtgcgagagaggccacgatttttggaatggttattgtaccgtttgactactggggccagggaaccctggtcaccgtctcctcagcctccaccaagggcccatcggtcttccccctggcaccctcctccaagagcacctctgggggcacagcggccctgggctgcctggtcaaggactacttccccgaaccggtgacggtgtcgtggaactcaggcgccctgaccagcggcgtgcacaccttcccggctgtcctacagtcctcaggactctactccctcagcagcgtggtgaccgtgccctccagcagcttgggcacccagacctacatctgcaacgtgaatcacaagcccagcaacaccaaggtggacaagaaagttgagcccaaatcttgtgacaaaactcacacatgcccaccgtgcccagcacctgaactcctggggggaccgtcagtcttcctcttccccccaaaacccaaggacaccctcatgatctcccggacccctgaggtcacatgcgtggtggtggacgtgagccacgaagaccctgaggtcaagttcaactggtacgtggacggcgtggaggtgcataatgccaagacaaagccgtgtgaggagcagtacggcagcacgtaccgttgtgtcagcgtcctcaccgtcctgcaccaggactggctgaatggcaaggagtacaagtgcaaggtctccaacaaagccctcccagcccccatcgagaaaaccatctccaaagccaaagggcagccccgagaaccacaggtgtacaccctgcccccatcccgggaggagatgaccaagaaccaggtcagcctgacctgcctggtcaaaggcttctatcccagcgacatcgccgtggagtgggagagcaatgggcagccggagaacaactacaagaccacgcctcccgtgctggactccgacggctccttcttcctctatagcaagctcaccgtggacaagagcaggtggcagcaggggaacgtcttctcatgctccgtgatgcatgaggctctgcacaaccactacacgcagaagagcctctccctgtctccgggtaaa

SEQ ID NO: 2048 - DNA, 1359 bp, Artificial Sequence
  source: /note="Description of Artificial Sequence: Synthetic polynucleotide"
caggtgccgctggtacagtctggggctgaggtgaagaagcctggggcctcagtgaaggtctcctgcaaggcttctggatacaccttcaccggctactatatacactgggtgcgtcaggcccctggacaagggcttgtgtggatggggtggatcagccctaacagtggtgacacaagctatgcacagaagtttcaggacagggtcaccatgaccagggacacgtccatcagcacagcctatatggagctgagcagactgagatctgacgacacggccgtgtatttctgtacgagagaggccacgatttttggaatgcttattgtaccatttgactactggggccagggaaccctggtcaccgtctcctcagcctccaccaagggcccatcggtcttccccctggcaccctcctccaagagcacctctgggggcacagcggccctgggctgcctggtcaaggactacttccccgaaccggtgacggtgtcgtggaactcaggcgccctgaccagcggcgtgcacaccttcccggctgtcctacagtcctcaggactctactccctcagcagcgtggtgaccgtgccctccagcagcttgggcacccagacctacatctgcaacgtgaatcacaagcccagcaacaccaaggtggacaagaaagttgagcccaaatcttgtgacaaaactcacacatgcccaccgtgcccagcacctgaactcctggggggaccgtcagtcttcctcttccccccaaaacccaaggacaccctcatgatctcccggacccctgaggtcacatgcgtggtggtggacgtgagccacgaagaccctgaggtcaagttcaactggtacgtggacggcgtggaggtgcataatgccaagacaaagccgtgtgaggagcagtacggcagcacgtaccgttgtgtcagcgtcctcaccgtcctgcaccaggactggctgaatggcaaggagtacaagtgcaaggtctccaacaaagccctcccagcccccatcgagaaaaccatctccaaagccaaagggcagccccgagaaccacaggtgtacaccctgcccccatcccgggaggagatgaccaagaaccaggtcagcctgacctgcctggtcaaaggcttctatcccagcgacatcgccgtggagtgggagagcaatgggcagccggagaacaactacaagaccacgcctcccgtgctggactccgacggctccttcttcctctatagcaagctcaccgtggacaagagcaggtggcagcaggggaacgtcttctcatgctccgtgatgcatgaggctctgcacaaccactacacgcagaagagcctctccctgtctccgggtaaa

SEQ ID NO: 2049 - DNA, 1359 bp, Artificial Sequence
  source: /note="Description of Artificial Sequence: Synthetic polynucleotide"
caggtgccgctggtgcagtctggggctgaggtgaagaagcctggggcctcagtgaaggtctcctgcaaggcttctggatacaccttcaccggctactatatacactgggtgcgtcaggcccctggacaagggcttgagtggatggggtggataagccctaacaatggtgacacaaactatgcacagaagtttcaggacagggtcaccatgaccagggacacgtccatcagcacagcctatatggagctgagcaggctgagatctgacgacacggccgtgtattactgtacgagagaggccacgatttttggaatgcttattgtaccatttgactactggggccagggaaccctggtcaccgtctcctcagcctccaccaagggcccatcggtcttccccctggcaccctcctccaagagcacctctgggggcacagcggccctgggctgcctggtcaaggactacttccccgaaccggtgacggtgtcgtggaactcaggcgccctgaccagcggcgtgcacaccttcccggctgtcctacagtcctcaggactctactccctcagcagcgtggtgaccgtgccctccagcagcttgggcacccagacctacatctgcaacgtgaatcacaagcccagcaacaccaaggtggacaagaaagttgagcccaaatcttgtgacaaaactcacacatgcccaccgtgcccagcacctgaactcctggggggaccgtcagtcttcctcttccccccaaaacccaaggacaccctcatgatctcccggacccctgaggtcacatgcgtggtggtggacgtgagccacgaagaccctgaggtcaagttcaactggtacgtggacggcgtggaggtgcataatgccaagacaaagccgtgtgaggagcagtacggcagcacgtaccgttgtgtcagcgtcctcaccgtcctgcaccaggactggctgaatggcaaggagtacaagtgcaaggtctccaacaaagccctcccagcccccatcgagaaaaccatctccaaagccaaagggcagccccgagaaccacaggtgtacaccctgcccccatcccgggaggagatgaccaagaaccaggtcagcctgacctgcctggtcaaaggcttctatcccagcgacatcgccgtggagtgggagagcaatgggcagccggagaacaactacaagaccacgcctcccgtgctggactccgacggctccttcttcctctatagcaagctcaccgtggacaagagcaggtggcagcaggggaacgtcttctcatgctccgtgatgcatgaggctctgcacaaccactacacgcagaagagcctctccctgtctccgggtaaa

SEQ ID NO: 2050 - DNA, 1368 bp, Artificial Sequence
  source: /note="Description of Artificial Sequence: Synthetic polynucleotide"
caggtgcagttgcaggagtcgggcccaggactggtgaagccttcacagaccctgtccctcacctgcactgtctctggtgactccatcagcagtggtggttactactggagctggatccgccagcacccagggaagggcctggagtggattgggtacatctattacagtgggagcacctactacaacccgtccctcaagagtcgagttaccatatcagtagacacgtctaagaaccagttctccctgaagctgagctctgtgactgccgcggacacggccgtgtattactgtgcgagagatcgtattacgatttttggagtggttatggggggcggtatggacgtctggggccaagggaccacggtcaccgtctcctcagcctccaccaagggcccatcggtcttccccctggcaccctcctccaagagcacctctgggggcacagcggccctgggctgcctggtcaaggactacttccccgaaccggtgacggtgtcgtggaactcaggcgccctgaccagcggcgtgcacaccttcccggctgtcctacagtcctcaggactctactccctcagcagcgtggtgaccgtgccctccagcagcttgggcacccagacctacatctgcaacgtgaatcacaagcccagcaacaccaaggtggacaagaaagttgagcccaaatcttgtgacaaaactcacacatgcccaccgtgcccagcacctgaactcctggggggaccgtcagtcttcctcttccccccaaaacccaaggacaccctcatgatctcccggacccctgaggtcacatgcgtggtggtggacgtgagccacgaagaccctgaggtcaagttcaactggtacgtggacggcgtggaggtgcataatgccaagacaaagccgtgtgaggagcagtacggcagcacgtaccgttgtgtcagcgtcctcaccgtcctgcaccaggactggctgaatggcaaggagtacaagtgcaaggtctccaacaaagccctcccagcccccatcgagaaaaccatctccaaagccaaagggcagccccgagaaccacaggtgtacaccctgcccccatcccgggaggagatgaccaagaaccaggtcagcctgacctgcctggtcaaaggcttctatcccagcgacatcgccgtggagtgggagagcaatgggcagccggagaacaactacaagaccacgcctcccgtgctggactccgacggctccttcttcctctatagcaagctcaccgtggacaagagcaggtggcagcaggggaacgtcttctcatgctccgtgatgcatgaggctctgcacaaccactacacgcagaagagcctctccctgtctccgggtaaa

SEQ ID NO: 2051 - DNA, 1350 bp, Artificial Sequence
  source: /note="Description of Artificial Sequence: Synthetic polynucleotide"
caggtgcagctggtggagtctgggggaggcgtggtccagcctgggaggtccctgagactctcctgtgcagcatctggattcaccttcagtaactatggcatgcactgggtccgccaggctccaggcgaggggctggagtgggtggcagctatatggtttgatggaagtgataaatactatgcagactccgtgaagggccgattcaccatctccagagacaactccaagaacacgctgtatctgcaaatgaacagcctgagagccgaggacacggctgtgtattactgtgcgagagatcaggcgatttttggagtggtccccgactactggggccagggaaccctggtcaccgtctcctcagcctccaccaagggcccatcggtcttccccctggcaccctcctccaagagcacctctgggggcacagcggccctgggctgcctggtcaaggactacttccccgaaccggtgacggtgtcgtggaactcaggcgccctgaccagcggcgtgcacaccttcccggctgtcctacagtcctcaggactctactccctcagcagcgtggtgaccgtgccctccagcagcttgggcacccagacctacatctgcaacgtgaatcacaagcccagcaacaccaaggtggacaagaaagttgagcccaaatcttgtgacaaaactcacacatgcccaccgtgcccagcacctgaactcctggggggaccgtcagtcttcctcttccccccaaaacccaaggacaccctcatgatctcccggacccctgaggtcacatgcgtggtggtggacgtgagccacgaagaccctgaggtcaagttcaactggtacgtggacggcgtggaggtgcataatgccaagacaaagccgtgtgaggagcagtacggcagcacgtaccgttgtgtcagcgtcctcaccgtcctgcaccaggactggctgaatggcaaggagtacaagtgcaaggtctccaacaaagccctcccagcccccatcgagaaaaccatctccaaagccaaagggcagccccgagaaccacaggtgtacaccctgcccccatcccgggaggagatgaccaagaaccaggtcagcctgacctgcctggtcaaaggcttctatcccagcgacatcgccgtggagtgggagagcaatgggcagccggagaacaactacaagaccacgcctcccgtgctggactccgacggctccttcttcctctatagcaagctcaccgtggacaagagcaggtggcagcaggggaacgtcttctcatgctccgtgatgcatgaggctctgcacaaccactacacgcagaagagcctctccctgtctccgggtaaa

SEQ ID NO: 2052 - DNA, 1353 bp, Artificial Sequence; identical to SEQ ID NO: 2044
  source: /note="Description of Artificial Sequence: Synthetic polynucleotide"

SEQ ID NO: 2053 - DNA, 1350 bp, Artificial Sequence
  source: /note="Description of Artificial Sequence: Synthetic polynucleotide"
caggtgcagctggtggagtctgggggaggcgtggtccagcctgggaggtccctgagactctcctgtgcagcgtctggattctccttcagtagctatggcatgcactgggtccgccagcctccaggcaaggggctggagtgggtggcagctatatggtatgatggaaataataaatactatgcagactccgtgaagggccgattcaccatctccagagacagttccaagaacacgctgtatctgcaaatgaacagcctgagagccgaggacacggctgtgtattactgtgcgagagatcggacgatttttggagtggtccttgagtacctcggccagggaaccctggtcaccgtctcctcagcctccaccaagggcccatcggtcttccccctggcaccctcctccaagagcacctctgggggcacagcggccctgggctgcctggtcaaggactacttccccgaaccggtgacggtgtcgtggaactcaggcgccctgaccagcggcgtgcacaccttcccggctgtcctacagtcctcaggactctactccctcagcagcgtggtgaccgtgccctccagcagcttgggcacccagacctacatctgcaacgtgaatcacaagcccagcaacaccaaggtggacaagaaagttgagcccaaatcttgtgacaaaactcacacatgcccaccgtgcccagcacctgaactcctggggggaccgtcagtcttcctcttccccccaaaacccaaggacaccctcatgatctcccggacccctgaggtcacatgcgtggtggtggacgtgagccacgaagaccctgaggtcaagttcaactggtacgtggacggcgtggaggtgcataatgccaagacaaagccgtgtgaggagcagtacggcagcacgtaccgttgtgtcagcgtcctcaccgtcctgcaccaggactggctgaatggcaaggagtacaagtgcaaggtctccaacaaagccctcccagcccccatcgagaaaaccatctccaaagccaaagggcagccccgagaaccacaggtgtacaccctgcccccatcccgggaggagatgaccaagaaccaggtcagcctgacctgcctggtcaaaggcttctatcccagcgacatcgccgtggagtgggagagcaatgggcagccggagaacaactacaagaccacgcctcccgtgctggactccgacggctccttcttcctctatagcaagctcaccgtggacaagagcaggtggcagcaggggaacgtcttctcatgctccgtgatgcatgaggctctgcacaaccactacacgcagaagagcctctccctgtctccgggtaaa

SEQ ID NO: 2054 - DNA, 1341 bp, Artificial Sequence
  source: /note="Description of Artificial Sequence: Synthetic polynucleotide"
caggtgcagctgcaggagtcgggcccaggactggtgaagccttcggagaccctgtccctcacctgcactgtctctcagggctccatcagtagttactactggagctggatccggcagcccgccgggaagggactagagtggattggccgtatctataccagtgggagcaccaactacaacccctccctcaagagtcgagtcaccatgtcaatagacacgtccaagaaccagttctccctgaaactgaactctgtgaccgccgcggacacggccgtgtattactgtgcgagagatgtagcagtggctggctttgactactggggccagggaaccctggtcaccgtctcctcagcctccaccaagggcccatcggtcttccccctggcaccctcctccaagagcacctctgggggcacagcggccctgggctgcctggtcaaggactacttccccgaaccggtgacggtgtcgtggaactcaggcgccctgaccagcggcgtgcacaccttcccggctgtcctacagtcctcaggactctactccctcagcagcgtggtgaccgtgccctccagcagcttgggcacccagacctacatctgcaacgtgaatcacaagcccagcaacaccaaggtggacaagaaagttgagcccaaatcttgtgacaaaactcacacatgcccaccgtgcccagcacctgaactcctggggggaccgtcagtcttcctcttccccccaaaacccaaggacaccctcatgatctcccggacccctgaggtcacatgcgtggtggtggacgtgagccacgaagaccctgaggtcaagttcaactggtacgtggacggcgtggaggtgcataatgccaagacaaagccgtgtgaggagcagtacggcagcacgtaccgttgtgtcagcgtcctcaccgtcctgcaccaggactggctgaatggcaaggagtacaagtgcaaggtctccaacaaagccctcccagcccccatcgagaaaaccatctccaaagccaaagggcagccccgagaaccacaggtgtacaccctgcccccatcccgggaggagatgaccaagaaccaggtcagcctgacctgcctggtcaaaggcttctatcccagcgacatcgccgtggagtgggagagcaatgggcagccggagaacaactacaagaccacgcctcccgtgctggactccgacggctccttcttcctctatagcaagctcaccgtggacaagagcaggtggcagcaggggaacgtcttctcatgctccgtgatgcatgaggctctgcacaaccactacacgcagaagagcctctccctgtctccgggtaaa

SEQ ID NO: 2055 - DNA, 1341 bp, Artificial Sequence
  source: /note="Description of Artificial Sequence: Synthetic polynucleotide"
caggtgcagctgcaggagtcgggcccaggactggtgaagccttcggagaccctgtccctcacctgcactgtctctgggggctccatcagtagttactactggagctggatccggcagcccgccgggaagggactagagtggattggccgtatctataccagtgggagcaccaactacaacccctccctcaagagtcgagtcaccatgtcaatagacacgtccaagaaccagttctccctgaaactgaactctgtgaccgccgcggacacggccgtgtattactgtgcgagagatgtagcagtggctggctttgactactggggccagggaaccctggtcaccgtctcctcagcctccaccaagggcccatcggtcttccccctggcaccctcctccaagagcacctctgggggcacagcggccctgggctgcctggtcaaggactacttccccgaaccggtgacggtgtcgtggaactcaggcgccctgaccagcggcgtgcacaccttcccggctgtcctacagtcctcaggactctactccctcagcagcgtggtgaccgtgccctccagcagcttgggcacccagacctacatctgcaacgtgaatcacaagcccagcaacaccaaggtggacaagaaagttgagcccaaatcttgtgacaaaactcacacatgcccaccgtgcccagcacctgaactcctggggggaccgtcagtcttcctcttccccccaaaacccaaggacaccctcatgatctcccggacccctgaggtcacatgcgtggtggtggacgtgagccacgaagaccctgaggtcaagttcaactggtacgtggacggcgtggaggtgcataatgccaagacaaagccgtgtgaggagcagtacggcagcacgtaccgttgtgtcagcgtcctcaccgtcctgcaccaggactggctgaatggcaaggagtacaagtgcaaggtctccaacaaagccctcccagcccccatcgagaaaaccatctccaaagccaaagggcagccccgagaaccacaggtgtacaccctgcccccatcccgggaggagatgaccaagaaccaggtcagcctgacctgcctggtcaaaggcttctatcccagcgacatcgccgtggagtgggagagcaatgggcagccggagaacaactacaagaccacgcctcccgtgctggactccgacggctccttcttcctctatagcaagctcaccgtggacaagagcaggtggcagcaggggaacgtcttctcatgctccgtgatgcatgaggctctgcacaaccactacacgcagaagagcctctccctgtctccgggtaaa

SEQ ID NO: 2056 - DNA, 1353 bp, Artificial Sequence
  source: /note="Description of Artificial Sequence: Synthetic polynucleotide"
caggtgcagctggtggagtctgggggaggcgtggtccagcctgggaggtccctgagactctcctgtgcagcgtctggattcaccttcagttactttggcatgcactgggtccgccaggctccaggcaaggggctggagtgggtggcagttatatggtatgatgcaagtaataaatactatgcagacgccgtgaagggccgcttcaccatctccagagacaattccaagaacacgctgtatctgcaaatgaacagcctgagagccgaggacacggctgtgtattactgtgcgcgagatgggacgatttttggagtgctcttgggggactactggggccagggaaccctggtcaccgtctcctcagcctccaccaagggcccatcggtcttccccctggcaccctcctccaagagcacctctgggggcacagcggccctgggctgcctggtcaaggactacttccccgaaccggtgacggtgtcgtggaactcaggcgccctgaccagcggcgtgcacaccttcccggctgtcctacagtcctcaggactctactccctcagcagcgtggtgaccgtgccctccagcagcttgggcacccagacctacatctgcaacgtgaatcacaagcccagcaacaccaaggtggacaagaaagttgagcccaaatcttgtgacaaaactcacacatgcccaccgtgcccagcacctgaactcctggggggaccgtcagtcttcctcttccccccaaaacccaaggacaccctcatgatctcccggacccctgaggtcacatgcgtggtggtggacgtgagccacgaagaccctgaggtcaagttcaactggtacgtggacggcgtggaggtgcataatgccaagacaaagccgtgtgaggagcagtacggcagcacgtaccgttgtgtcagcgtcctcaccgtcctgcaccaggactggctgaatggcaaggagtacaagtgcaaggtctccaacaaagccctcccagcccccatcgagaaaaccatctccaaagccaaagggcagccccgagaaccacaggtgtacaccctgcccccatcccgggaggagatgaccaagaaccaggtcagcctgacctgcctggtcaaaggcttctatcccagcgacatcgccgtggagtgggagagcaatgggcagccggagaacaactacaagaccacgcctcccgtgctggactccgacggctccttcttcctctatagcaagctcaccgtggacaagagcaggtggcagcaggggaacgtcttctcatgctccgtgatgcatgaggctctgcacaaccactacacgcagaagagcctctccctgtctccgggtaaa

SEQ ID NO: 2057 - DNA, 1353 bp, Artificial Sequence
  source: /note="Description of Artificial Sequence: Synthetic polynucleotide"
caggtgcagctggtggagtctgggggaggcgtggtccagcctgggaggtccctgagactctcctgtgcagcgtctggattcaccttcagttactttggcatgcactgggtccgccaggctccaggcaaggggctggagtgggtggcagttatatggtatgatgcaagtaataaatactatgcagactccgtgaagggccgcttcaccatctccagagacaattccaagaacacgctgtatctgcaaatgaacagcctgagagccgaggacacggctgtgtattactgtgcgcgagatgggacgatttttggagtgctcttgggggactactggggccagggaaccctggtcaccgtctcctcagcctccaccaagggcccatcggtcttccccctggcaccctcctccaagagcacctctgggggcacagcggccctgggctgcctggtcaaggactacttccccgaaccggtgacggtgtcgtggaactcaggcgccctgaccagcggcgtgcacaccttcccggctgtcctacagtcctcaggactctactccctcagcagcgtggtgaccgtgccctccagcagcttgggcacccagacctacatctgcaacgtgaatcacaagcccagcaacaccaaggtggacaagaaagttgagcccaaatcttgtgacaaaactcacacatgcccaccgtgcccagcacctgaactcctggggggaccgtcagtcttcctcttccccccaaaacccaaggacaccctcatgatctcccggacccctgaggtcacatgcgtggtggtggacgtgagccacgaagaccctgaggtcaagttcaactggtacgtggacggcgtggaggtgcataatgccaagacaaagccgtgtgaggagcagtacggcagcacgtaccgttgtgtcagcgtcctcaccgtcctgcaccaggactggctgaatggcaaggagtacaagtgcaaggtctccaacaaagccctcccagcccccatcgagaaaaccatctccaaagccaaagggcagccccgagaaccacaggtgtacaccctgcccccatcccgggaggagatgaccaagaaccaggtcagcctgacctgcctggtcaaaggcttctatcccagcgacatcgccgtggagtgggagagcaatgggcagccggagaacaactacaagaccacgcctcccgtgctggactccgacggctccttcttcctctatagcaagctcaccgtggacaagagcaggtggcagcaggggaacgtcttctcatgctccgtgatgcatgaggctctgcacaaccactacacgcagaagagcctctccctgtctccgggtaaa

SEQ ID NO: 2058 - DNA, 1353 bp, Artificial Sequence
  source: /note="Description of Artificial Sequence: Synthetic polynucleotide"
caggtgcagctggtggagtctgggggaggcgtggtccagcctgggaggtccctgagactctcctgtgcagcgtctggattcaccttcagttactttggcatgcactgggtccgccaggctccaggcaaggggctggagtgggtggcagttatatggtatgatggaagtaataaatactatgcagacgccgtgaagggccgcttcaccatctccagagacaattccaagaacacgctgtatctgcaaatgaacagcctgagagccgaggacacggctgtgtattactgtgcgcgagatgggacgatttttggagtgctcttgggggactactggggccagggaaccctggtcaccgtctcctcagcctccaccaagggcccatcggtcttccccctggcaccctcctccaagagcacctctgggggcacagcggccctgggctgcctggtcaaggactacttccccgaaccggtgacggtgtcgtggaactcaggcgccctgaccagcggcgtgcacaccttcccggctgtcctacagtcctcaggactctactccctcagcagcgtggtgaccgtgccctccagcagcttgggcacccagacctacatctgcaacgtgaatcacaagcccagcaacaccaaggtggacaagaaagttgagcccaaatcttgtgacaaaactcacacatgcccaccgtgcccagcacctgaactcctggggggaccgtcagtcttcctcttccccccaaaacccaaggacaccctcatgatctcccggacccctgaggtcacatgcgtggtggtggacgtgagccacgaagaccctgaggtcaagttcaactggtacgtggacggcgtggaggtgcataatgccaagacaaagccgtgtgaggagcagtacggcagcacgtaccgttgtgtcagcgtcctcaccgtcctgcaccaggactggctgaatggcaaggagtacaagtgcaaggtctccaacaaagccctcccagcccccatcgagaaaaccatctccaaagccaaagggcagccccgagaaccacaggtgtacaccctgcccccatcccgggaggagatgaccaagaaccaggtcagcctgacctgcctggtcaaaggcttctatcccagcgacatcgccgtggagtgggagagcaatgggcagccggagaacaactacaagaccacgcctcccgtgctggactccgacggctccttcttcctctatagcaagctcaccgtggacaagagcaggtggcagcaggggaacgtcttctcatgctccgtgatgcatgaggctctgcacaaccactacacgcagaagagcctctccctgtctccgggtaaa

SEQ ID NO: 2059 - DNA, 1353 bp, Artificial Sequence; identical to SEQ ID NO: 2056
  source: /note="Description of Artificial Sequence: Synthetic polynucleotide"

SEQ ID NO: 2060 - DNA, 1353 bp, Artificial Sequence; identical to SEQ ID NO: 2056
  source: /note="Description of Artificial Sequence: Synthetic polynucleotide"

SEQ ID NO: 2061 - DNA, 1353 bp, Artificial Sequence
  source: /note="Description of Artificial Sequence: Synthetic polynucleotide"
caggtgcagctggtggagtctgggggaggcgtggtccagcctgggaggtccctgagactctcctgtgcagcgtctggattcaccttcagttactttggcatgcactgggtccgccaggctccaggcaaggggctggagtgggtggcagttatatggtatgatgcaagtaataaatactatgcagacgccgtgaagggccgcttcaccatctccagagacaattccaagaacacgctgtatctgcaaatgaacagcctgagagccgaggacacggctgtgtattactgtgcgcgagataggacgatttttggagtgctcttgggggactactggggccagggaaccctggtcaccgtctcctcagcctccaccaagggcccatcggtcttccccctggcaccctcctccaagagcacctctgggggcacagcggccctgggctgcctggtcaaggactacttccccgaaccggtgacggtgtcgtggaactcaggcgccctgaccagcggcgtgcacaccttcccggctgtcctacagtcctcaggactctactccctcagcagcgtggtgaccgtgccctccagcagcttgggcacccagacctacatctgcaacgtgaatcacaagcccagcaacaccaaggtggacaagaaagttgagcccaaatcttgtgacaaaactcacacatgcccaccgtgcccagcacctgaactcctggggggaccgtcagtcttcctcttccccccaaaacccaaggacaccctcatgatctcccggacccctgaggtcacatgcgtggtggtggacgtgagccacgaagaccctgaggtcaagttcaactggtacgtggacggcgtggaggtgcataatgccaagacaaagccgtgtgaggagcagtacggcagcacgtaccgttgtgtcagcgtcctcaccgtcctgcaccaggactggctgaatggcaaggagtacaagtgcaaggtctccaacaaagccctcccagcccccatcgagaaaaccatctccaaagccaaagggcagccccgagaaccacaggtgtacaccctgcccccatcccgggaggagatgaccaagaaccaggtcagcctgacctgcctggtcaaaggcttctatcccagcgacatcgccgtggagtgggagagcaatgggcagccggagaacaactacaagaccacgcctcccgtgctggactccgacggctccttcttcctctatagcaagctcaccgtggacaagagcaggtggcagcaggggaacgtcttctcatgctccgtgatgcatgaggctctgcacaaccactacacgcagaagagcctctccctgtctccgggtaaa

SEQ ID NO: 2062 - DNA, 1353 bp, Artificial Sequence
  source: /note="Description of Artificial Sequence: Synthetic polynucleotide"
caggtgcagctggtggagtctgggggaggcgtggtccagcctgggaggtccctgagactctcctgtgcagcgtctggattcactttcagtaactttggcatgcactgggtccgccaggctccaggcaaggggctggagtgggtggcagttatatggtatgatgcaagtaatgaaaactatgcagacgccgtgaagggccgattcaccatctccagagacaattccaagaatacgctgtatctgcaaatgaacagcctgagagtcgcggacacggctgtgtattattgtgcgcgagatgggacgatctttggagtggtcttgggggactactggggccagggaaccctggtcaccgtctcctcagcctccaccaagggcccatcggtcttccccctggcaccctcctccaagagcacctctgggggcacagcggccctgggctgcctggtcaaggactacttccccgaaccggtgacggtgtcgtggaactcaggcgccctgaccagcggcgtgcacaccttcccggctgtcctacagtcctcaggactctactccctcagcagcgtggtgaccgtgccctccagcagcttgggcacccagacctacatctgcaacgtgaatcacaagcccagcaacaccaaggtggacaagaaagttgagcccaaatcttgtgacaaaactcacacatgcccaccgtgcccagcacctgaactcctggggggaccgtcagtcttcctcttccccccaaaacccaaggacaccctcatgatctcccggacccctgaggtcacatgcgtggtggtggacgtgagccacgaagaccctgaggtcaagttcaactggtacgtggacggcgtggaggtgcataatgccaagacaaagccgtgtgaggagcagtacggcagcacgtaccgttgtgtcagcgtcctcaccgtcctgcaccaggactggctgaatggcaaggagtacaagtgcaaggtctccaacaaagccctcccagcccccatcgagaaaaccatctccaaagccaaagggcagccccgagaaccacaggtgtacaccctgcccccatcccgggaggagatgaccaagaaccaggtcagcctgacctgcctggtcaaaggcttctatcccagcgacatcgccgtggagtgggagagcaatgggcagccggagaacaactacaagaccacgcctcccgtgctggactccgacggctccttcttcctctatagcaagctcaccgtggacaagagcaggtggcagcaggggaacgtcttctcatgctccgtgatgcatgaggctctgcacaaccactacacgcagaagagcctctccctgtctccgggtaaa

SEQ ID NO: 2063 - DNA, 1353 bp, Artificial Sequence; identical to SEQ ID NO: 2062
  source: /note="Description of Artificial Sequence: Synthetic polynucleotide"

SEQ ID NO: 2064 - DNA, 1353 bp, Artificial Sequence; identical to SEQ ID NO: 2062
  source: /note="Description of Artificial Sequence: Synthetic polynucleotide"

SEQ ID NO: 2065 - DNA, 1353 bp, Artificial Sequence
  source: /note="Description of Artificial Sequence: Synthetic polynucleotide"
caggtgcagctggtggagtctgggggaggcgtggtccagcctgggaggtccctgagactctcctgtgcagcgtctggattcactttcagtaactttggcatgcactgggtccgccaggctccaggcaaggggctggagtgggtggcagttatatggtatgatgcaagtaatgaaaactatgcagactccgtgaagggccgattcaccatctccagagacaattccaagaatacgctgtatctgcacatgaacagcctgagagtcgcggacacggctgtgtattattgtgcgcgagatgggacgatctttggagtggtcttgggggactactggggccagggaaccctggtcaccgtctcctcagcctccaccaagggcccatcggtcttccccctggcaccctcctccaagagcacctctgggggcacagcggccctgggctgcctggtcaaggactacttccccgaaccggtgacggtgtcgtggaactcaggcgccctgaccagcggcgtgcacaccttcccggctgtcctacagtcctcaggactctactccctcagcagcgtggtgaccgtgccctccagcagcttgggcacccagacctacatctgcaacgtgaatcacaagcccagcaacaccaaggtggacaagaaagttgagcccaaatcttgtgacaaaactcacacatgcccaccgtgcccagcacctgaactcctggggggaccgtcagtcttcctcttccccccaaaacccaaggacaccctcatgatctcccggacccctgaggtcacatgcgtggtggtggacgtgagccacgaagaccctgaggtcaagttcaactggtacgtggacggcgtggaggtgcataatgccaagacaaagccgtgtgaggagcagtacggcagcacgtaccgttgtgtcagcgtcctcaccgtcctgcaccaggactggctgaatggcaaggagtacaagtgcaaggtctccaacaaagccctcccagcccccatcgagaaaaccatctccaaagccaaagggcagccccgagaaccacaggtgtacaccctgcccccatcccgggaggagatgaccaagaaccaggtcagcctgacctgcctggtcaaaggcttctatcccagcgacatcgccgtggagtgggagagcaatgggcagccggagaacaactacaagaccacgcctcccgtgctggactccgacggctccttcttcctctatagcaagctcaccgtggacaagagcaggtggcagcaggggaacgtcttctcatgctccgtgatgcatgaggctctgcacaaccactacacgcagaagagcctctccctgtctccgggtaaa

SEQ ID NO: 2066 - DNA, 1353 bp, Artificial Sequence
  source: /note="Description of Artificial Sequence: Synthetic polynucleotide"
caggtgcagctggtggagtctgggggaggcgtggtccagcctgggaggtccctgagactctcctgtgcagcgtctggattcactttcagtaactttggcatgcactgggtccgccaggctccaggcaaggggctggagtgggtggcagttatatggtatgatggaagtaatgaaaactatgcagacgccgtgaagggccgattcaccatctccagagacaattccaagaatacgctgtatctgcacatgaacagcctgagagtcgcggacacggctgtgtattattgtgcgcgagatgggacgatctttggagtggtcttgggggactactggggccagggaaccctggtcaccgtctcctcagcctccaccaagggcccatcggtcttccccctggcaccctcctccaagagcacctctgggggcacagcggccctgggctgcctggtcaaggactacttccccgaaccggtgacggtgtcgtggaactcaggcgccctgaccagcggcgtgcacaccttcccggctgtcctacagtcctcaggactctactccctcagcagcgtggtgaccgtgccctccagcagcttgggcacccagacctacatctgcaacgtgaatcacaagcccagcaacaccaaggtggacaagaaagttgagcccaaatcttgtgacaaaactcacacatgcccaccgtgcccagcacctgaactcctggggggaccgtcagtcttcctcttccccccaaaacccaaggacaccctcatgatctcccggacccctgaggtcacatgcgtggtggtggacgtgagccacgaagaccctgaggtcaagttcaactggtacgtggacggcgtggaggtgcataatgccaagacaaagccgtgtgaggagcagtacggcagcacgtaccgttgtgtcagcgtcctcaccgtcctgcaccaggactggctgaatggcaaggagtacaagtgcaaggtctccaacaaagccctcccagcccccatcgagaaaaccatctccaaagccaaagggcagccccgagaaccacaggtgtacaccctgcccccatcccgggaggagatgaccaagaaccaggtcagcctgacctgcctggtcaaaggcttctatcccagcgacatcgccgtggagtgggagagcaatgggcagccggagaacaactacaagaccacgcctcccgtgctggactccgacggctccttcttcctctatagcaagctcaccgtggacaagagcaggtggcagcaggggaacgtcttctcatgctccgtgatgcatgaggctctgcacaaccactacacgcagaagagcctctccctgtctccgggtaaa

SEQ ID NO: 2067 - DNA, 1353 bp, Artificial Sequence
  source: /note="Description of Artificial Sequence: Synthetic polynucleotide"
caggtgcagctggtggagtctgggggaggcgtggtccagcctgggaggtccctgagactctcctgtgcagcgtctggattcactttcagtaactttggcatgcactgggtccgccaggctccaggcaaggggctggagtgggtggcagttatatggtatgatgcaagtaatgaaaactatgcagacgccgtgaagggccgattcaccatctccagagacaattccaagaatacgctgtatctgcaaatgaacagcctgagagtcgaggacacggctgtgtattattgtgcgcgagataggacgatctttggagtggtcttgggggactactggggccagggaaccctggtcaccgtctcctcagcctccaccaagggcccatcggtcttccccctggcaccctcctccaagagcacctctgggggcacagcggccctgggctgcctggtcaaggactacttccccgaaccggtgacggtgtcgtggaactcaggcgccctgaccagcggcgtgcacaccttcccggctgtcctacagtcctcaggactctactccctcagcagcgtggtgaccgtgccctccagcagcttgggcacccagacctacatctgcaacgtgaatcacaagcccagcaacaccaaggtggacaagaaagttgagcccaaatcttgtgacaaaactcacacatgcccaccgtgcccagcacctgaactcctggggggaccgtcagtcttcctcttccccccaaaacccaaggacaccctcatgatctcccggacccctgaggtcacatgcgtggtggtggacgtgagccacgaagaccctgaggtcaagttcaactggtacgtggacggcgtggaggtgcataatgccaagacaaagccgtgtgaggagcagtacggcagcacgtaccgttgtgtcagcgtcctcaccgtcctgcaccaggactggctgaatggcaaggagtacaagtgcaaggtctccaacaaagccctcccagcccccatcgagaaaaccatctccaaagccaaagggcagccccgagaaccacaggtgtacaccctgcccccatcccgggaggagatgaccaagaaccaggtcagcctgacctgcctggtcaaaggcttctatcccagcgacatcgccgtggagtgggagagcaatgggcagccggagaacaactacaagaccacgcctcccgtgctggactccgacggctccttcttcctctatagcaagctcaccgtggacaagagcaggtggcagcaggggaacgtcttctcatgctccgtgatgcatgaggctctgcacaaccactacacgcagaagagcctctccctgtctccgggtaaa

SEQ ID NO: 2068 - DNA, 1353 bp, Artificial Sequence
  source: /note="Description of Artificial Sequence: Synthetic polynucleotide"
caggtgcagctggtggagtctgggggaggcgtggtccagcctgggaggtccctgagactctcctgtgcagcgtctggattcactttcagtaactttggcatgcactgggtccgccaggctccaggcaaggggctggagtgggtggcagttatatggtatgatgcaagtaatgaaaactatgcagacgccgtgaagggccgattcaccatctccagagacaattccaagaatacgctgtatctgcaaatgaacagcctgagagtcgaggacacggctgtgtattattgtgcgcgagatgggacgatctttggagtggtcttgggggactactggggccagggaaccctggtcaccgtctcctcagcctccaccaagggcccatcggtcttccccctggcaccctcctccaagagcacctctgggggcacagcggccctgggctgcctggtcaaggactacttccccgaaccggtgacggtgtcgtggaactcaggcgccctgaccagcggcgtgcacaccttcccggctgtcctacagtcctcaggactctactccctcagcagcgtggtgaccgtgccctccagcagcttgggcacccagacctacatctgcaacgtgaatcacaagcccagcaacaccaaggtggacaagaaagttgagcccaaatcttgtgacaaaactcacacatgcccaccgtgcccagcacctgaactcctggggggaccgtcagtcttcctcttccccccaaaacccaaggacaccctcatgatctcccggacccctgaggtcacatgcgtggtggtggacgtgagccacgaagaccctgaggtcaagttcaactggtacgtggacggcgtggaggtgcataatgccaagacaaagccgtgtgaggagcagtacggcagcacgtaccgttgtgtcagcgtcctcaccgtcctgcaccaggactggctgaatggcaaggagtacaagtgcaaggtctccaacaaagccctcccagcccccatcgagaaaaccatctccaaagccaaagggcagccccgagaaccacaggtgtacaccctgcccccatcccgggaggagatgaccaagaaccaggtcagcctgacctgcctggtcaaaggcttctatcccagcgacatcgccgtggagtgggagagcaatgggcagccggagaacaactacaagaccacgcctcccgtgctggactccgacggctccttcttcctctatagcaagctcaccgtggacaagagcaggtggcagcaggggaacgtcttctcatgctccgtgatgcatgaggctctgcacaaccactacacgcagaagagcctctccctgtctccgggtaaa

SEQ ID NO: 2069 - DNA, 1353 bp, Artificial Sequence
  source: /note="Description of Artificial Sequence: Synthetic polynucleotide"
caggtgcagctggtggagtctgggggaggcgtggtccagcctgggaggtccctgagactctcctgtgcagcgtctggattcactttcagtaactttggcatgcactgggtccgccaggccccaggcaaggggctggagtgggtggcagttatatggtatgatggaagtaatgaaaactatgcagactccgtgaagggccgattcaccatctccagagacaattccaagaacacgctgtatctgcacatgaacagcctgagagccgcggacacggctgtgtattactgtgcgagagatgggacgatctttggagtggtcttgggggactactggggccagggaaccctggtcaccgtctcctcagcctccaccaagggcccatcggtcttccccctggcaccctcctccaagagcacctctgggggcacagcggccctgggctgcctggtcaaggactacttccccgaaccggtgacggtgtcgtggaactcaggcgccctgaccagcggcgtgcacaccttcccggctgtcctacagtcctcaggactctactccctcagcagcgtggtgaccgtgccctccagcagcttgggcacccagacctacatctgcaacgtgaatcacaagcccagcaacaccaaggtggacaagaaagttgagcccaaatcttgtgacaaaactcacacatgcccaccgtgcccagcacctgaactcctggggggaccgtcagtcttcctcttccccccaaaacccaaggacaccctcatgatctcccggacccctgaggtcacatgcgtggtggtggacgtgagccacgaagaccctgaggtcaagttcaactggtacgtggacggcgtggaggtgcataatgccaagacaaagccgtgtgaggagcagtacggcagcacgtaccgttgtgtcagcgtcctcaccgtcctgcaccaggactggctgaatggcaaggagtacaagtgcaaggtctccaacaaagccctcccagcccccatcgagaaaaccatctccaaagccaaagggcagccccgagaaccacaggtgtacaccctgcccccatcccgggaggagatgaccaagaaccaggtcagcctgacctgcctggtcaaaggcttctatcccagcgacatcgccgtggagtgggagagcaatgggcagccggagaacaactacaagaccacgcctcccgtgctggactccgacggctccttcttcctctatagcaagctcaccgtggacaagagcaggtggcagcaggggaacgtcttctcatgctccgtgatgcatgaggctctgcacaaccactacacgcagaagagcctctccctgtctccgggtaaa

SEQ ID NO: 2070 - DNA, 1353 bp, Artificial Sequence
  source: /note="Description of Artificial Sequence: Synthetic polynucleotide"
caggtgcagctggtggagtctgggggaggcgtggtccagcctgggaggtccctgagactctcctgtgcagcgtctggattcactttcagtaactttggcatgcactgggtccgccaggccccaggcaaggggctggagtgggtggcagttatatggtatgatgcaagtaatgaaaactatgcagacgccgtgaagggccgattcaccatctccagagacaattccaagaacacgctgtatctgcaaatgaacagcctgagagccgcggacacggctgtgtattactgtgcgagagatgggacgatctttggagtggtcttgggggactactggggccagggaaccctggtcaccgtctcctcagcctccaccaagggcccatcggtcttccccctggcaccctcctccaagagcacctctgggggcacagcggccctgggctgcctggtcaaggactacttccccgaaccggtgacggtgtcgtggaactcaggcgccctgaccagcggcgtgcacaccttcccggctgtcctacagtcctcaggactctactccctcagcagcgtggtgaccgtgccctccagcagcttgggcacccagacctacatctgcaacgtgaatcacaagcccagcaacaccaaggtggacaagaaagttgagcccaaatcttgtgacaaaactcacacatgcccaccgtgcccagcacctgaactcctggggggaccgtcagtcttcctcttccccccaaaacccaaggacaccctcatgatctcccggacccctgaggtcacatgcgtggtggtggacgtgagccacgaagaccctgaggtcaagttcaactggtacgtggacggcgtggaggtgcataatgccaagacaaagccgtgtgaggagcagtacggcagcacgtaccgttgtgtcagcgtcctcaccgtcctgcaccaggactggctgaatggcaaggagtacaagtgcaaggtctccaacaaagccctcccagcccccatcgagaaaaccatctccaaagccaaagggcagccccgagaaccacaggtgtacaccctgcccccatcccgggaggagatgaccaagaaccaggtcagcctgacctgcctggtcaaaggcttctatcccagcgacatcgccgtggagtgggagagcaatgggcagccggagaacaactacaagaccacgcctcccgtgctggactccgacggctccttcttcctctatagcaagctcaccgtggacaagagcaggtggcagcaggggaacgtcttctcatgctccgtgatgcatgaggctctgcacaaccactacacgcagaagagcctctccctgtctccgggtaaa

SEQ ID NO: 2071 - DNA, 1353 bp, Artificial Sequence
  source: /note="Description of Artificial Sequence: Synthetic polynucleotide"
caggtgcagctggtggagtctgggggaggcgtggtccagcctgggaggtccctgagactctcctgtgcagcgtctggattcactttcagtaactttggcatgcactgggtccgccaggccccaggcaaggggctggagtgggtggcagttatatggtatgatgcaagtaatgaaaactatgcagacgccgtgaagggccgattcaccatctccagagacaattccaagaacacgctgtatctgcacatgaacagcctgagagccgcggacacggctgtgtattactgtgcgagagatgggacgatctttggagtggtcttgggggactactggggccagggaaccctggtcaccgtctcctcagcctccaccaagggcccatcggtcttccccctggcaccctcctccaagagcacctctgggggcacagcggccctgggctgcctggtcaaggactacttccccgaaccggtgacggtgtcgtggaactcaggcgccctgaccagcggcgtgcacaccttcccggctgtcctacagtcctcaggactctactccctcagcagcgtggtgaccgtgccctccagcagcttgggcacccagacctacatctgcaacgtgaatcacaagcccagcaacaccaaggtggacaagaaagttgagcccaaatcttgtgacaaaactcacacatgcccaccgtgcccagcacctgaactcctggggggaccgtcagtcttcctcttccccccaaaacccaaggacaccctcatgatctcccggacccctgaggtcacatgcgtggtggtggacgtgagccacgaagaccctgaggtcaagttcaactggtacgtggacggcgtggaggtgcataatgccaagacaaagccgtgtgaggagcagtacggcagcacgtaccgttgtgtcagcgtcctcaccgtcctgcaccaggactggctgaatggcaaggagtacaagtgcaaggtctccaacaaagccctcccagcccccatcgagaaaaccatctccaaagccaaagggcagccccgagaaccacaggtgtacaccctgcccccatcccgggaggagatgaccaagaaccaggtcagcctgacctgcctggtcaaaggcttctatcccagcgacatcgccgtggagtgggagagcaatgggcagccggagaacaactacaagaccacgcctcccgtgctggactccgacggctccttcttcctctatagcaagctcaccgtggacaagagcaggtggcagcaggggaacgtcttctcatgctccgtgatgcatgaggctctgcacaaccactacacgcagaagagcctctccctgtctccgggtaaa

SEQ ID NO: 2072 - DNA, 1353 bp, Artificial Sequence; identical to SEQ ID NO: 2070
  source: /note="Description of Artificial Sequence: Synthetic polynucleotide"

SEQ ID NO: 2073 - DNA, 1353 bp, Artificial Sequence; identical to SEQ ID NO: 2070
  source: /note="Description of Artificial Sequence: Synthetic polynucleotide"

SEQ ID NO: 2074 - DNA, 1353 bp, Artificial Sequence; identical to SEQ ID NO: 2071
  source: /note="Description of Artificial Sequence: Synthetic polynucleotide"

SEQ ID NO: 2075 - DNA, 1353 bp, Artificial Sequence; identical to SEQ ID NO: 2071
  source: /note="Description of Artificial Sequence: Synthetic polynucleotide"

SEQ ID NO: 2076 - DNA, 1353 bp, Artificial Sequence; identical to SEQ ID NO: 2070
  source: /note="Description of Artificial Sequence: Synthetic polynucleotide"

SEQ ID NO: 2077 - DNA, 1353 bp, Artificial Sequence
  source: /note="Description of Artificial Sequence: Synthetic polynucleotide"
caggtgcagctggtggagtctgggggaggcgtggtccagcctgggaggtccctgagactctcctgtgcagcgtctggattcactttcagtaactttggcatgcactgggtccgccaggccccaggcaaggggctggagtgggtggcagttatatggtatgatggaagtaatgaaaactatgcagacgccgtgaagggccgattcaccatctccagagacaattccaagaacacgctgtatctgcaaatgaacagcctgagagccgcggacacggctgtgtattactgtgcgagagatgggacgatctttggagtggtcttgggggactactggggccagggaaccctggtcaccgtctcctcagcctccaccaagggcccatcggtcttccccctggcaccctcctccaagagcacctctgggggcacagcggccctgggctgcctggtcaaggactacttccccgaaccggtgacggtgtcgtggaactcaggcgccctgaccagcggcgtgcacaccttcccggctgtcctacagtcctcaggactctactccctcagcagcgtggtgaccgtgccctccagcagcttgggcacccagacctacatctgcaacgtgaatcacaagcccagcaacaccaaggtggacaagaaagttgagcccaaatcttgtgacaaaactcacacatgcccaccgtgcccagcacctgaactcctggggggaccgtcagtcttcctcttccccccaaaacccaaggacaccctcatgatctcccggacccctgaggtcacatgcgtggtggtggacgtgagccacgaagaccctgaggtcaagttcaactggtacgtggacggcgtggaggtgcataatgccaagacaaagccgtgtgaggagcagtacggcagcacgtaccgttgtgtcagcgtcctcaccgtcctgcaccaggactggctgaatggcaaggagtacaagtgcaaggtctccaacaaagccctcccagcccccatcgagaaaaccatctccaaagccaaagggcagccccgagaaccacaggtgtacaccctgcccccatcccgggaggagatgaccaagaaccaggtcagcctgacctgcctggtcaaaggcttctatcccagcgacatcgccgtggagtgggagagcaatgggcagccggagaacaactacaagaccacgcctcccgtgctggactccgacggctccttcttcctctatagcaagctcaccgtggacaagagcaggtggcagcaggggaacgtcttctcatgctccgtgatgcatgaggctctgcacaaccactacacgcagaagagcctctccctgtctccgggtaaa

SEQ ID NO: 2078 - DNA, 1353 bp, Artificial Sequence
  source: /note="Description of Artificial Sequence: Synthetic polynucleotide"
caggtgcagctggtggagtctgggggaggcgtggtccagcctgggaggtccctgagactctcctgtgcagcgtctggattcactttcagtaactttggcatgcactgggtccgccaggccccaggcaaggggctggagtgggtggcagttatatggtatgatgcaagtaatgaaaactatgcagactccgtgaagggccgattcaccatctccagagacaattccaagaacacgctgtatctgcaaatgaacagcctgagagccgcggacacggctgtgtattactgtgcgagagatgggacgatctttggagtggtcttgggggactactggggccagggaaccctggtcaccgtctcctcagcctccaccaagggcccatcggtcttccccctggcaccctcctccaagagcacctctgggggcacagcggccctgggctgcctggtcaaggactacttccccgaaccggtgacggtgtcgtggaactcaggcgccctgaccagcggcgtgcacaccttcccggctgtcctacagtcctcaggactctactccctcagcagcgtggtgaccgtgccctccagcagcttgggcacccagacctacatctgcaacgtgaatcacaagcccagcaacaccaaggtggacaagaaagttgagcccaaatcttgtgacaaaactcacacatgcccaccgtgcccagcacctgaactcctggggggaccgtcagtcttcctcttccccccaaaacccaaggacaccctcatgatctcccggacccctgaggtcacatgcgtggtggtggacgtgagccacgaagaccctgaggtcaagttcaactggtacgtggacggcgtggaggtgcataatgccaagacaaagccgtgtgaggagcagtacggcagcacgtaccgttgtgtcagcgtcctcaccgtcctgcaccaggactggctgaatggcaaggagtacaagtgcaaggtctccaacaaagccctcccagcccccatcgagaaaaccatctccaaagccaaagggcagccccgagaaccacaggtgtacaccctgcccccatcccgggaggagatgaccaagaaccaggtcagcctgacctgcctggtcaaaggcttctatcccagcgacatcgccgtggagtgggagagcaatgggcagccggagaacaactacaagaccacgcctcccgtgctggactccgacggctccttcttcctctatagcaagctcaccgtggacaagagcaggtggcagcaggggaacgtcttctcatgctccgtgatgcatgaggctctgcacaaccactacacgcagaagagcctctccctgtctccgggtaaa

SEQ ID NO: 2079 - DNA, 1353 bp, Artificial Sequence
  source: /note="Description of Artificial Sequence: Synthetic polynucleotide"
caggtgcagctggtggagtctgggggaggcgtggtccagcctgggaggtccctgagactctcctgtgcagcgtctggattcactttcagtaactttggcatgcactgggtccgccaggccccaggcaaggggctggagtgggtggcagttatatggtatgatgcaagtaatgaaaactatgcagacgccgtgaagggccgattcaccatctccagagacaattccaagaacacgctgtatctgcaaatgaacagcctgagagccgaggacacggctgtgtattactgtgcgagagataggacgatctttggagtggtcttgggggactactggggccagggaaccctggtcaccgtctcctcagcctccaccaagggcccatcggtcttccccctggcaccctcctccaagagcacctctgggggcacagcggccctgggctgcctggtcaaggactacttccccgaaccggtgacggtgtcgtggaactcaggcgccctgaccagcggcgtgcacaccttcccggctgtcctacagtcctcaggactctactccctcagcagcgtggtgaccgtgccctccagcagcttgggcacccagacctacatctgcaacgtgaatcacaagcccagcaacaccaaggtggacaagaaagttgagcccaaatcttgtgacaaaactcacacatgcccaccgtgcccagcacctgaactcctggggggaccgtcagtcttcctcttccccccaaaacccaaggacaccctcatgatctcccggacccctgaggtcacatgcgtggtggtggacgtgagccacgaagaccctgaggtcaagttcaactggtacgtggacggcgtggaggtgcataatgccaagacaaagccgtgtgaggagcagtacggcagcacgtaccgttgtgtcagcgtcctcaccgtcctgcaccaggactggctgaatggcaaggagtacaagtgcaaggtctccaacaaagccctcccagcccccatcgagaaaaccatctccaaagccaaagggcagccccgagaaccacaggtgtacaccctgcccccatcccgggaggagatgaccaagaaccaggtcagcctgacctgcctggtcaaaggcttctatcccagcgacatcgccgtggagtgggagagcaatgggcagccggagaacaactacaagaccacgcctcccgtgctggactccgacggctccttcttcctctatagcaagctcaccgtggacaagagcaggtggcagcaggggaacgtcttctcatgctccgtgatgcatgaggctctgcacaaccactacacgcagaagagcctctccctgtctccgggtaaa

SEQ ID NO: 2080 - DNA, 1353 bp, Artificial Sequence
  source: /note="Description of Artificial Sequence: Synthetic polynucleotide"
caggtgcagctggtggagtctgggggaggcgtggtccagcctgggaggtccctgagactctcctgtgcagcgtctggattcactttcagtaactttggcatgcactgggtccgccaggccccaggcaaggggctggagtgggtggcagttatatggtatgatgcaagtaatgaaaactatgcagacgccgtgaagggccgattcaccatctccagagacaattccaagaacacgctgtatctgcaaatgaacagcctgagagccgaggacacggctgtgtattactgtgcgagagatgggacgatctttggagtggtcttgggggactactggggccagggaaccctggtcaccgtctcctcagcctccaccaagggcccatcggtcttccccctggcaccctcctccaagagcacctctgggggcacagcggccctgggctgcctggtcaaggactacttccccgaaccggtgacggtgtcgtggaactcaggcgccctgaccagcggcgtgcacaccttcccggctgtcctacagtcctcaggactctactccctcagcagcgtggtgaccgtgccctccagcagcttgggcacccagacctacatctgcaacgtgaatcacaagcccagcaacaccaaggtggacaagaaagttgagcccaaatcttgtgacaaaactcacacatgcccaccgtgcccagcacctgaactcctggggggaccgtcagtcttcctcttccccccaaaacccaaggacaccctcatgatctcccggacccctgaggtcacatgcgtggtggtggacgtgagccacgaagaccctgaggtcaagttcaactggtacgtggacggcgtggaggtgcataatgccaagacaaagccgtgtgaggagcagtacggcagcacgtaccgttgtgtcagcgtcctcaccgtcctgcaccaggactggctgaatggcaaggagtacaagtgcaaggtctccaacaaagccctcccagcccccatcgagaaaaccatctccaaagccaaagggcagccccgagaaccacaggtgtacaccctgcccccatcccgggaggagatgaccaagaaccaggtcagcctgacctgcctggtcaaaggcttctatcccagcgacatcgccgtggagtgggagagcaatgggcagccggagaacaactacaagaccacgcctcccgtgctggactccgacggctccttcttcctctatagcaagctcaccgtggacaagagcaggtggcagcaggggaacgtcttctcatgctccgtgatgcatgaggctctgcacaaccactacacgcagaagagcctctccctgtctccgggtaaa

SEQ ID NO: 2081 - DNA, 1350 bp, Artificial Sequence
  source: /note="Description of Artificial Sequence: Synthetic polynucleotide"
caggtgcaactggtggagtctgggggaggcgtggtccagcctgggaggtccctgagactctcctgtgcagcgtctggattcaccttcagtagctatggcatgcactgggtccgccaggctccaggcaaggggctggagtgggtggcagttatatggtatgatgcaagtaataaatactatgcagacgccgtgaagggccgattcaccatctccagggacaattccaagaacacgctgtatctgcaaatgaacagcctgagagccgaggacacggctgtgtattactgtgcgagagataggacgatttttggagtggttcttgactactggggccagggaaccctggtcaccgtctcctcagcctccaccaagggcccatcggtcttccccctggcaccctcctccaagagcacctctgggggcacagcggccctgggctgcctggtcaaggactacttccccgaaccggtgacggtgtcgtggaactcaggcgccctgaccagcggcgtgcacaccttcccggctgtcctacagtcctcaggactctactccctcagcagcgtggtgaccgtgccctccagcagcttgggcacccagacctacatctgcaacgtgaatcacaagcccagcaacaccaaggtggacaagaaagttgagcccaaatcttgtgacaaaactcacacatgcccaccgtgcccagcacctgaactcctggggggaccgtcagtcttcctcttccccccaaaacccaaggacaccctcatgatctcccggacccctgaggtcacatgcgtggtggtggacgtgagccacgaagaccctgaggtcaagttcaactggtacgtggacggcgtggaggtgcataatgccaagacaaagccgtgtgaggagcagtacggcagcacgtaccgttgtgtcagcgtcctcaccgtcctgcaccaggactggctgaatggcaaggagtacaagtgcaaggtctccaacaaagccctcccagcccccatcgagaaaaccatctccaaagccaaagggcagccccgagaaccacaggtgtacaccctgcccccatcccgggaggagatgaccaagaaccaggtcagcctgacctgcctggtcaaaggcttctatcccagcgacatcgccgtggagtgggagagcaatgggcagccggagaacaactacaagaccacgcctcccgtgctggactccgacggctccttcttcctctatagcaagctcaccgtggacaagagcaggtggcagcaggggaacgtcttctcatgctccgtgatgcatgaggctctgcacaaccactacacgcagaagagcctctccctgtctccgggtaaa

SEQ ID NO: 2082 - DNA, 1350 bp, Artificial Sequence
  source: /note="Description of Artificial Sequence: Synthetic polynucleotide"
caggtgcaactggtggagtctgggggaggcgtggtccagcctgggaggtccctgagactctcctgtgcagcgtctggattcaccttcagtagctatggcatgcactgggtccgccaggctccaggcaaggggctggagtgggtggcagttatatggtatgatgcaagtaataaatactatgcagacgccgtgaagggccgattcaccatctccagcgacaattccaagaacacgctgtatctgcaaatgaacagcctgagagccgaggacacggctgtgtattactgtgcgagagataggacgatttttggagtggttcttgactactggggccagggaaccctggtcaccgtctcctcagcctccaccaagggcccatcggtcttccccctggcaccctcctccaagagcacctctgggggcacagcggccctgggctgcctggtcaaggactacttccccgaaccggtgacggtgtcgtggaactcaggcgccctgaccagcggcgtgcacaccttcccggctgtcctacagtcctcaggactctactccctcagcagcgtggtgaccgtgccctccagcagcttgggcacccagacctacatctgcaacgtgaatcacaagcccagcaacaccaaggtggacaagaaagttgagcccaaatcttgtgacaaaactcacacatgcccaccgtgcccagcacctgaactcctggggggaccgtcagtcttcctcttccccccaaaacccaaggacaccctcatgatctcccggacccctgaggtcacatgcgtggtggtggacgtgagccacgaagaccctgaggtcaagttcaactggtacgtggacggcgtggaggtgcataatgccaagacaaagccgtgtgaggagcagtacggcagcacgtaccgttgtgtcagcgtcctcaccgtcctgcaccaggactggctgaatggcaaggagtacaagtgcaaggtctccaacaaagccctcccagcccccatcgagaaaaccatctccaaagccaaagggcagccccgagaaccacaggtgtacaccctgcccccatcccgggaggagatgaccaagaaccaggtcagcctgacctgcctggtcaaaggcttctatcccagcgacatcgccgtggagtgggagagcaatgggcagccggagaacaactacaagaccacgcctcccgtgctggactccgacggctccttcttcctctatagcaagctcaccgtggacaagagcaggtggcagcaggggaacgtcttctcatgctccgtgatgcatgaggctctgcacaaccactacacgcagaagagcctctccctgtctccgggtaaa

SEQ ID NO: 2083 - DNA, 1350 bp, Artificial Sequence; identical to SEQ ID NO: 2081
  source: /note="Description of Artificial Sequence: Synthetic polynucleotide"

SEQ ID NO: 2084 - DNA, 1350 bp, Artificial Sequence; identical to SEQ ID NO: 2081
  source: /note="Description of Artificial Sequence: Synthetic polynucleotide"

SEQ ID NO: 2085 - DNA, 1350 bp, Artificial Sequence; identical to SEQ ID NO: 2082
  source: /note="Description of Artificial Sequence: Synthetic polynucleotide"

SEQ ID NO: 2086 - DNA, 1350 bp, Artificial Sequence; identical to SEQ ID NO: 2082
  source: /note="Description of Artificial Sequence: Synthetic polynucleotide"

SEQ ID NO: 2087 - DNA, 1350 bp, Artificial Sequence; identical to SEQ ID NO: 2081
  source: /note="Description of Artificial Sequence: Synthetic polynucleotide"

SEQ ID NO: 2088 - DNA, 1350 bp, Artificial Sequence
  source: /note="Description of Artificial Sequence: Synthetic polynucleotide"
caggtgcaactggtggagtctgggggaggcgtggtccagcctgggaggtccctgagactctcctgtgcagcgtctggattcaccttcagtagctatggcatgcactgggtccgccaggctccaggcaaggggctggagtgggtggcagttatatggtatgatgcaagtaataaatactatgcagactccgtgaagggccgattcaccatctccagggacaattccaagaacacgctgtatctgcaaatgaacagcctgagagccgaggacacggctgtgtattactgtgcgagagataggacgatttttggagtggttcttgactactggggccagggaaccctggtcaccgtctcctcagcctccaccaagggcccatcggtcttccccctggcaccctcctccaagagcacctctgggggcacagcggccctgggctgcctggtcaaggactacttccccgaaccggtgacggtgtcgtggaactcaggcgccctgaccagcggcgtgcacaccttcccggctgtcctacagtcctcaggactctactccctcagcagcgtggtgaccgtgccctccagcagcttgggcacccagacctacatctgcaacgtgaatcacaagcccagcaacaccaaggtggacaagaaagttgagcccaaatcttgtgacaaaactcacacatgcccaccgtgcccagcacctgaactcctggggggaccgtcagtcttcctcttccccccaaaacccaaggacaccctcatgatctcccggacccctgaggtcacatgcgtggtggtggacgtgagccacgaagaccctgaggtcaagttcaactggtacgtggacggcgtggaggtgcataatgccaagacaaagccgtgtgaggagcagtacggcagcacgtaccgttgtgtcagcgtcctcaccgtcctgcaccaggactggctgaatggcaaggagtacaagtgcaaggtctccaacaaagccctcccagcccccatcgagaaaaccatctccaaagccaaagggcagccccgagaaccacaggtgtacaccctgcccccatcccgggaggagatgaccaagaaccaggtcagcctgacctgcctggtcaaaggcttctatcccagcgacatcgccgtggagtgggagagcaatgggcagccggagaacaactacaagaccacgcctcccgtgctggactccgacggctccttcttcctctatagcaagctcaccgtggacaagagcaggtggcagcaggggaacgtcttctcatgctccgtgatgcatgaggctctgcacaaccactacacgcagaagagcctctccctgtctccgggtaaa

SEQ ID NO: 2089 - DNA, 1350 bp, Artificial Sequence
  source: /note="Description of Artificial Sequence: Synthetic polynucleotide"
caggtgcaactggtggagtctgggggaggcgtggtccagcctgggaggtccctgagactctcctgtgcagcgtctggattcaccttcagtagctatggcatgcactgggtccgccaggctccaggcaaggggctggagtgggtggcagttatatggtatgatggaagtaataaatactatgcagacgccgtgaagggccgattcaccatctccagggacaattccaagaacacgctgtatctgcaaatgaacagcctgagagccgaggacacggctgtgtattactgtgcgagagataggacgatttttggagtggttcttgactactggggccagggaaccctggtcaccgtctcctcagcctccaccaagggcccatcggtcttccccctggcaccctcctccaagagcacctctgggggcacagcggccctgggctgcctggtcaaggactacttccccgaaccggtgacggtgtcgtggaactcaggcgccctgaccagcggcgtgcacaccttcccggctgtcctacagtcctcaggactctactccctcagcagcgtggtgaccgtgccctccagcagcttgggcacccagacctacatctgcaacgtgaatcacaagcccagcaacaccaaggtggacaagaaagttgagcccaaatcttgtgacaaaactcacacatgcccaccgtgcccagcacctgaactcctggggggaccgtcagtcttcctcttccccccaaaacccaaggacaccctcatgatctcccggacccctgaggtcacatgcgtggtggtggacgtgagccacgaagaccctgaggtcaagttcaactggtacgtggacggcgtggaggtgcataatgccaagacaaagccgtgtgaggagcagtacggcagcacgtaccgttgtgtcagcgtcctcaccgtcctgcaccaggactggctgaatggcaaggagtacaagtgcaaggtctccaacaaagccctcccagcccccatcgagaaaaccatctccaaagccaaagggcagccccgagaaccacaggtgtacaccctgcccccatcccgggaggagatgaccaagaaccaggtcagcctgacctgcctggtcaaaggcttctatcccagcgacatcgccgtggagtgggagagcaatgggcagccggagaacaactacaagaccacgcctcccgtgctggactccgacggctccttcttcctctatagcaagctcaccgtggacaagagcaggtggcagcaggggaacgtcttctcatgctccgtgatgcatgaggctctgcacaaccactacacgcagaagagcctctccctgtctccgggtaaa

SEQ ID NO: 2090 - DNA, 1353 bp, Artificial Sequence; identical to SEQ ID NO: 2056
  source: /note="Description of Artificial Sequence: Synthetic polynucleotide"

SEQ ID NO: 2091 - DNA, 1353 bp, Artificial Sequence; identical to SEQ ID NO: 2061
  source: /note="Description of Artificial Sequence: Synthetic polynucleotide"

SEQ ID NO: 2092 - DNA, 1353 bp, Artificial Sequence; identical to SEQ ID NO: 2056
  source: /note="Description of Artificial Sequence: Synthetic polynucleotide"

SEQ ID NO: 2093 - DNA, 1353 bp, Artificial Sequence; identical to SEQ ID NO: 2061
  source: /note="Description of Artificial Sequence: Synthetic polynucleotide"

SEQ ID NO: 2094 - DNA, 1353 bp, Artificial Sequence; identical to SEQ ID NO: 2044
  source: /note="Description of Artificial Sequence: Synthetic polynucleotide"

SEQ ID NO: 2095 - DNA, 1353 bp, Artificial Sequence; identical to SEQ ID NO: 2057
  source: /note="Description of Artificial Sequence: Synthetic polynucleotide"

SEQ ID NO: 2096 - DNA, 1353 bp, Artificial Sequence; identical to SEQ ID NO: 2058
  source: /note="Description of Artificial Sequence: Synthetic polynucleotide"

SEQ ID NO: 2097 - DNA, 1350 bp, Artificial Sequence
  source: /note="Description of Artificial Sequence: Synthetic polynucleotide"
caggtgcagctggtggagtctgggggaggcgtggtccagcctgggaggtccctgagactctcctgtgcagcgtctggattctccttcagtagctatggcatgcactgggtccgccagcctccaggcaaggggctggagtgggtggcagctatatggtatgatgcaaataataaatactatgcagacgccgtgaagggccgattcaccatctccagagacagttccaagaacacgctgtatctgcaaatgaacagcctgagagccgaggacacggctgtgtattactgtgcgagagatcggacgatttttggagtggtccttgagtactggggccagggaaccctggtcaccgtctcctcagcctccaccaagggcccatcggtcttccccctggcaccctcctccaagagcacctctgggggcacagcggccctgggctgcctggtcaaggactacttccccgaaccggtgacggtgtcgtggaactcaggcgccctgaccagcggcgtgcacaccttcccggctgtcctacagtcctcaggactctactccctcagcagcgtggtgaccgtgccctccagcagcttgggcacccagacctacatctgcaacgtgaatcacaagcccagcaacaccaaggtggacaagaaagttgagcccaaatcttgtgacaaaactcacacatgcccaccgtgcccagcacctgaactcctggggggaccgtcagtcttcctcttccccccaaaacccaaggacaccctcatgatctcccggacccctgaggtcacatgcgtggtggtggacgtgagccacgaagaccctgaggtcaagttcaactggtacgtggacggcgtggaggtgcataatgccaagacaaagccgtgtgaggagcagtacggcagcacgtaccgttgtgtcagcgtcctcaccgtcctgcaccaggactggctgaatggcaaggagtacaagtgcaaggtctccaacaaagccctcccagcccccatcgagaaaaccatctccaaagccaaagggcagccccgagaaccacaggtgtacaccctgcccccatcccgggaggagatgaccaagaaccaggtcagcctgacctgcctggtcaaaggcttctatcccagcgacatcgccgtggagtgggagagcaatgggcagccggagaacaactacaagaccacgcctcccgtgctggactccgacggctccttcttcctctatagcaagctcaccgtggacaagagcaggtggcagcaggggaacgtcttctcatgctccgtgatgcatgaggctctgcacaaccactacacgcagaagagcctctccctgtctccgggtaaa

SEQ ID NO: 2098 - DNA, 1350 bp, Artificial Sequence; identical to SEQ ID NO: 2097
  source: /note="Description of Artificial Sequence: Synthetic polynucleotide"

SEQ ID NO: 2099 - DNA, 1350 bp, Artificial Sequence
  source: /note="Description of Artificial Sequence: Synthetic polynucleotide"
caggtgcagctggtggagtctgggggaggcgtggtccagcctgggaggtccctgagactctcctgtgcagcgtctggattctccttcagtagctatggcatgcactgggtccgccagcctccaggcaaggggctggagtgggtggcagctatatggtatgatgcaaataataaatactatgcagacgccgtgaagggccgattcaccatctccagagacagttccaagaacacgctgtatctgcaaatgaacagcctgagagccgaggacacggctgtgtattactgtgcgagagatcggacgatttttggagtggtccttgagtacctcggccagggaaccctggtcaccgtctcctcagcctccaccaagggcccatcggtcttccccctggcaccctcctccaagagcacctctgggggcacagcggccctgggctgcctggtcaaggactacttccccgaaccggtgacggtgtcgtggaactcaggcgccctgaccagcggcgtgcacaccttcccggctgtcctacagtcctcaggactctactccctcagcagcgtggtgaccgtgccctccagcagcttgggcacccagacctacatctgcaacgtgaatcacaagcccagcaacaccaaggtggacaagaaagttgagcccaaatcttgtgacaaaactcacacatgcccaccgtgcccagcacctgaactcctggggggaccgtcagtcttcctcttccccccaaaacccaaggacaccctcatgatctcccggacccctgaggtcacatgcgtggtggtggacgtgagccacgaagaccctgaggtcaagttcaactggtacgtggacggcgtggaggtgcataatgccaagacaaagccgtgtgaggagcagtacggcagcacgtaccgttgtgtcagcgtcctcaccgtcctgcaccaggactggctgaatggcaaggagtacaagtgcaaggtctccaacaaagccctcccagcccccatcgagaaaaccatctccaaagccaaagggcagccccgagaaccacaggtgtacaccctgcccccatcccgggaggagatgaccaagaaccaggtcagcctgacctgcctggtcaaaggcttctatcccagcgacatcgccgtggagtgggagagcaatgggcagccggagaacaactacaagaccacgcctcccgtgctggactccgacggctccttcttcctctatagcaagctcaccgtggacaagagcaggtggcagcaggggaacgtcttctcatgctccgtgatgcatgaggctctgcacaaccactacacgcagaagagcctctccctgtctccgggtaaa

SEQ ID NO: 2100 - DNA, 1350 bp, Artificial Sequence; identical to SEQ ID NO: 2097
  source: /note="Description of Artificial Sequence: Synthetic polynucleotide"

SEQ ID NO: 2101 - DNA, 1350 bp, Artificial Sequence; identical to SEQ ID NO: 2099
  source: /note="Description of Artificial Sequence: Synthetic polynucleotide"

SEQ ID NO: 2102 - DNA, 1350 bp, Artificial Sequence; identical to SEQ ID NO: 2099
  source: /note="Description of Artificial Sequence: Synthetic polynucleotide"

SEQ ID NO: 2103 - DNA, 1350 bp, Artificial Sequence; identical to SEQ ID NO: 2097
  source: /note="Description of Artificial Sequence: Synthetic polynucleotide"

SEQ ID NO: 2104 - DNA, 1350 bp, Artificial Sequence
  source: /note="Description of Artificial Sequence: Synthetic polynucleotide"
caggtgcagctggtggagtctgggggaggcgtggtccagcctgggaggtccctgagactctcctgtgcagcgtctggattctccttcagtagctatggcatgcactgggtccgccagcctccaggcaaggggctggagtgggtggcagctatatggtatgatggaaataataaatactatgcagacgccgtgaagggccgattcaccatctccagagacagttccaagaacacgctgtatctgcaaatgaacagcctgagagccgaggacacggctgtgtattactgtgcgagagatcggacgatttttggagtggtccttgagtactggggccagggaaccctggtcaccgtctcctcagcctccaccaagggcccatcggtcttccccctggcaccctcctccaagagcacctctgggggcacagcggccctgggctgcctggtcaaggactacttccccgaaccggtgacggtgtcgtggaactcaggcgccctgaccagcggcgtgcacaccttcccggctgtcctacagtcctcaggactctactccctcagcagcgtggtgaccgtgccctccagcagcttgggcacccagacctacatctgcaacgtgaatcacaagcccagcaacaccaaggtggacaagaaagttgagcccaaatcttgtgacaaaactcacacatgcccaccgtgcccagcacctgaactcctggggggaccgtcagtcttcctcttccccccaaaacccaaggacaccctcatgatctcccggacccctgaggtcacatgcgtggtggtggacgtgagccacgaagaccctgaggtcaagttcaactggtacgtggacggcgtggaggtgcataatgccaagacaaagccgtgtgaggagcagtacggcagcacgtaccgttgtgtcagcgtcctcaccgtcctgcaccaggactggctgaatggcaaggagtacaagtgcaaggtctccaacaaagccctcccagcccccatcgagaaaaccatctccaaagccaaagggcagccccgagaaccacaggtgtacaccctgcccccatcccgggaggagatgaccaagaaccaggtcagcctgacctgcctggtcaaaggcttctatcccagcgacatcgccgtggagtgggagagcaatgggcagccggagaacaactacaagaccacgcctcccgtgctggactccgacggctccttcttcctctatagcaagctcaccgtggacaagagcaggtggcagcaggggaacgtcttctcatgctccgtgatgcatgaggctctgcacaaccactacacgcagaagagcctctccctgtctccgggtaaa

SEQ ID NO: 2105 - DNA, 1350 bp, Artificial Sequence
  source: /note="Description of Artificial Sequence: Synthetic polynucleotide"
caggtgcagctggtggagtctgggggaggcgtggtccagcctgggaggtccctgagactctcctgtgcagcgtctggattctccttcagtagctatggcatgcactgggtccgccagcctccaggcaaggggctggagtgggtggcagctatatggtatgatgcaaataataaatactatgcagactccgtgaagggccgattcaccatctccagagacagttccaagaacacgctgtatctgcaaatgaacagcctgagagccgaggacacggctgtgtattactgtgcgagagatcggacgatttttggagtggtccttgagtactggggccagggaaccctggtcaccgtctcctcagcctccaccaagggcccatcggtcttccccctggcaccctcctccaagagcacctctgggggcacagcggccctgggctgcctggtcaaggactacttccccgaaccggtgacggtgtcgtggaactcaggcgccctgaccagcggcgtgcacaccttcccggctgtcctacagtcctcaggactctactccctcagcagcgtggtgaccgtgccctccagcagcttgggcacccagacctacatctgcaacgtgaatcacaagcccagcaacaccaaggtggacaagaaagttgagcccaaatcttgtgacaaaactcacacatgcccaccgtgcccagcacctgaactcctggggggaccgtcagtcttcctcttccccccaaaacccaaggacaccctcatgatctcccggacccctgaggtcacatgcgtggtggtggacgtgagccacgaagaccctgaggtcaagttcaactggtacgtggacggcgtggaggtgcataatgccaagacaaagccgtgtgaggagcagtacggcagcacgtaccgttgtgtcagcgtcctcaccgtcctgcaccaggactggctgaatggcaaggagtacaagtgcaaggtctccaacaaagccctcccagcccccatcgagaaaaccatctccaaagccaaagggcagccccgagaaccacaggtgtacaccctgcccccatcccgggaggagatgaccaagaaccaggtcagcctgacctgcctggtcaaaggcttctatcccagcgacatcgccgtggagtgggagagcaatgggcagccggagaacaactacaagaccacgcctcccgtgctggactccgacggctccttcttcctctatagcaagctcaccgtggacaagagcaggtggcagcaggggaacgtcttctcatgctccgtgatgcatgaggctctgcacaaccactacacgcagaagagcctctccctgtctccgggtaaa

SEQ ID NO: 2106 - DNA, 1350 bp, Artificial Sequence; identical to SEQ ID NO: 2097
  source: /note="Description of Artificial Sequence: Synthetic polynucleotide"

SEQ ID NO: 2107 - DNA, 1350 bp, Artificial Sequence; identical to SEQ ID NO: 2099
  source: /note="Description of Artificial Sequence: Synthetic polynucleotide"

SEQ ID NO: 2108 - DNA, 1350 bp, Artificial Sequence
  source: /note="Description of Artificial Sequence: Synthetic polynucleotide"
caggtgcagctggtggagtctgggggaggcgtggtccagcctgggaggtccctgagactctcctgtgcagcgtctggattcagtttcagtagctatggcatgcactgggtccgccaggctccaggcaagggactggagtgggtggcagttatatggtatgatgcaagtaataaatactatgaagacgccgtgaagggccgattcaccatctccagagacaattccaagaacacgctgtttctgcaagtgaacagcctgagagccgaggacacggctgtgtattactgtgcgagagggattacgatttttggtcatgggtttgaatattggggccagggaaccctggtcaccgtctcctcagcctccaccaagggcccatcggtcttccccctggcaccctcctccaagagcacctctgggggcacagcggccctgggctgcctggtcaaggactacttccccgaaccggtgacggtgtcgtggaactcaggcgccctgaccagcggcgtgcacaccttcccggctgtcctacagtcctcaggactctactccctcagcagcgtggtgaccgtgccctccagcagcttgggcacccagacctacatctgcaacgtgaatcacaagcccagcaacaccaaggtggacaagaaagttgagcccaaatcttgtgacaaaactcacacatgcccaccgtgcccagcacctgaactcctggggggaccgtcagtcttcctcttccccccaaaacccaaggacaccctcatgatctcccggacccctgaggtcacatgcgtggtggtggacgtgagccacgaagaccctgaggtcaagttcaactggtacgtggacggcgtggaggtgcataatgccaagacaaagccgtgtgaggagcagtacggcagcacgtaccgttgtgtcagcgtcctcaccgtcctgcaccaggactggctgaatggcaaggagtacaagtgcaaggtctccaacaaagccctcccagcccccatcgagaaaaccatctccaaagccaaagggcagccccgagaaccacaggtgtacaccctgcccccatcccgggaggagatgaccaagaaccaggtcagcctgacctgcctggtcaaaggcttctatcccagcgacatcgccgtggagtgggagagcaatgggcagccggagaacaactacaagaccacgcctcccgtgctggactccgacggctccttcttcctctatagcaagctcaccgtggacaagagcaggtggcagcaggggaacgtcttctcatgctccgtgatgcatgaggctctgcacaaccactacacgcagaagagcctctccctgtctccgggtaaa

SEQ ID NO: 2109 - DNA, 1350 bp, Artificial Sequence
  source: /note="Description of Artificial Sequence: Synthetic polynucleotide"
caggtgcagctggtggagtctgggggaggcgtggtccagcctgggaggtccctgagactctcctgtgcagcgtctggattcagtttcagtagctatggcatgcactgggtccgccaggctccaggcaagggactggagtgggtggcagttatatggtatgatggaagtaataaatactatgaagactccgtgaagggccgattcaccatctccagagacaattccaagaacacgctgtttctgcaagtgaacagcctgagagccgaggacacggctgtgtattactgtgcgagagggattacgatttttggtcatgggtttgaatattggggccagggaaccctggtcaccgtctcctcagcctccaccaagggcccatcggtcttccccctggcaccctcctccaagagcacctctgggggcacagcggccctgggctgcctggtcaaggactacttccccgaaccggtgacggtgtcgtggaactcaggcgccctgaccagcggcgtgcacaccttcccggctgtcctacagtcctcaggactctactccctcagcagcgtggtgaccgtgccctccagcagcttgggcacccagacctacatctgcaacgtgaatcacaagcccagcaacaccaaggtggacaagaaagttgagcccaaatcttgtgacaaaactcacacatgcccaccgtgcccagcacctgaactcctggggggaccgtcagtcttcctcttccccccaaaacccaaggacaccctcatgatctcccggacccctgaggtcacatgcgtggtggtggacgtgagccacgaagaccctgaggtcaagttcaactggtacgtggacggcgtggaggtgcataatgccaagacaaagccgtgtgaggagcagtacggcagcacgtaccgttgtgtcagcgtcctcaccgtcctgcaccaggactggctgaatggcaaggagtacaagtgcaaggtctccaacaaagccctcccagcccccatcgagaaaaccatctccaaagccaaagggcagccccgagaaccacaggtgtacaccctgcccccatcccgggaggagatgaccaagaaccaggtcagcctgacctgcctggtcaaaggcttctatcccagcgacatcgccgtggagtgggagagcaatgggcagccggagaacaactacaagaccacgcctcccgtgctggactccgacggctccttcttcctctatagcaagctcaccgtggacaagagcaggtggcagcaggggaacgtcttctcatgctccgtgatgcatgaggctctgcacaaccactacacgcagaagagcctctccctgtctccgggtaaa

SEQ ID NO: 2110 - DNA, 1350 bp, Artificial Sequence
  source: /note="Description of Artificial Sequence: Synthetic polynucleotide"
caggtgcagctggtggagtctgggggaggcgtggtccagcctgggaggtccctgagactctcctgtgcagcgtctggattcagtttcagtagctatggcatgcactgggtccgccaggctccaggcaagggactggagtgggtggcagttatatggtatgatggaagtaataaatactatgaagacgccgtgaagggccgattcaccatctccagagacaattccaagaacacgctgtttctgcaagtgaacagcctgagagccgaggacacggctgtgtattactgtgcgagagggattacgatttttggtcatgggtttgaatattggggccagggaaccctggtcaccgtctcctcagcctccaccaagggcccatcggtcttccccctggcaccctcctccaagagcacctctgggggcacagcggccctgggctgcctggtcaaggactacttccccgaaccggtgacggtgtcgtggaactcaggcgccctgaccagcggcgtgcacaccttcccggctgtcctacagtcctcaggactctactccctcagcagcgtggtgaccgtgccctccagcagcttgggcacccagacctacatctgcaacgtgaatcacaagcccagcaacaccaaggtggacaagaaagttgagcccaaatcttgtgacaaaactcacacatgcccaccgtgcccagcacctgaactcctggggggaccgtcagtcttcctcttccccccaaaacccaaggacaccctcatgatctcccggacccctgaggtcacatgcgtggtggtggacgtgagccacgaagaccctgaggtcaagttcaactggtacgtggacggcgtggaggtgcataatgccaagacaaagccgtgtgaggagcagtacggcagcacgtaccgttgtgtcagcgtcctcaccgtcctgcaccaggactggctgaatggcaaggagtacaagtgcaaggtctccaacaaagccctcccagcccccatcgagaaaaccatctccaaagccaaagggcagccccgagaaccacaggtgtacaccctgcccccatcccgggaggagatgaccaagaaccaggtcagcctgacctgcctggtcaaaggcttctatcccagcgacatcgccgtggagtgggagagcaatgggcagccggagaacaactacaagaccacgcctcccgtgctggactccgacggctccttcttcctctatagcaagctcaccgtggacaagagcaggtggcagcaggggaacgtcttctcatgctccgtgatgcatgaggctctgcacaaccactacacgcagaagagcctctccctgtctccgggtaaa

SEQ ID NO: 2111 - DNA, 1350 bp, Artificial Sequence
  source: /note="Description of Artificial Sequence: Synthetic polynucleotide"
caggtgcagctggtggagtctgggggaggcgtggtccagcctgggaggtccctgagactctcctgtgcagcgtctggattcagtttcagtagctatggcatgcactgggtccgccaggctccaggcaagggactggagtgggtggcagttatatggtatgatgcaagtaataaatactatgaagactccgtgaagggccgattcaccatctccagagacaattccaagaacacgctgtttctgcaagtgaacagcctgagagccgaggacacggctgtgtattactgtgcgagagggattacgatttttggtcatgggtttgaatattggggccagggaaccctggtcaccgtctcctcagcctccaccaagggcccatcggtcttccccctggcaccctcctccaagagcacctctgggggcacagcggccctgggctgcctggtcaaggactacttccccgaaccggtgacggtgtcgtggaactcaggcgccctgaccagcggcgtgcacaccttcccggctgtcctacagtcctcaggactctactccctcagcagcgtggtgaccgtgccctccagcagcttgggcacccagacctacatctgcaacgtgaatcacaagcccagcaacaccaaggtggacaagaaagttgagcccaaatcttgtgacaaaactcacacatgcccaccgtgcccagcacctgaactcctggggggaccgtcagtcttcctcttccccccaaaacccaaggacaccctcatgatctcccggacccctgaggtcacatgcgtggtggtggacgtgagccacgaagaccctgaggtcaagttcaactggtacgtggacggcgtggaggtgcataatgccaagacaaagccgtgtgaggagcagtacggcagcacgtaccgttgtgtcagcgtcctcaccgtcctgcaccaggactggctgaatggcaaggagtacaagtgcaaggtctccaacaaagccctcccagcccccatcgagaaaaccatctccaaagccaaagggcagccccgagaaccacaggtgtacaccctgcccccatcccgggaggagatgaccaagaaccaggtcagcctgacctgcctggtcaaaggcttctatcccagcgacatcgccgtggagtgggagagcaatgggcagccggagaacaactacaagaccacgcctcccgtgctggactccgacggctccttcttcctctatagcaagctcaccgtggacaagagcaggtggcagcaggggaacgtcttctcatgctccgtgatgcatgaggctctgcacaaccactacacgcagaagagcctctccctgtctccgggtaaa

SEQ ID NO: 2112 - DNA, 1350 bp, Artificial Sequence
  source: /note="Description of Artificial Sequence: Synthetic polynucleotide"
caggtgcagctggtggagtctgggggaggcgtggtccagcctgggaggtccctgagactctcctgtgcagcatctggattcaccttcagtaactatggcatgcactgggtccgccaggctccaggcgaggggctggagtgggtggcagctatatggtttgatgcaagtgataaatactatgcagacgccgtgaagggccgattcaccatctccagagacaactccaagaacacgctgtatctgcaaatgaacagcctgagagccgaggacacggctgtgtattactgtgcgagagatcaggcgatttttggagtggtccccgactactggggccagggaaccctggtcaccgtctcctcagcctccaccaagggcccatcggtcttccccctggcaccctcctccaagagcacctctgggggcacagcggccctgggctgcctggtcaaggactacttccccgaaccggtgacggtgtcgtggaactcaggcgccctgaccagcggcgtgcacaccttcccggctgtcctacagtcctcaggactctactccctcagcagcgtggtgaccgtgccctccagcagcttgggcacccagacctacatctgcaacgtgaatcacaagcccagcaacaccaaggtggacaagaaagttgagcccaaatcttgtgacaaaactcacacatgcccaccgtgcccagcacctgaactcctggggggaccgtcagtcttcctcttccccccaaaacccaaggacaccctcatgatctcccggacccctgaggtcacatgcgtggtggtggacgtgagccacgaagaccctgaggtcaagttcaactggtacgtggacggcgtggaggtgcataatgccaagacaaagccgtgtgaggagcagtacggcagcacgtaccgttgtgtcagcgtcctcaccgtcctgcaccaggactggctgaatggcaaggagtacaagtgcaaggtctccaacaaagccctcccagcccccatcgagaaaaccatctccaaagccaaagggcagccccgagaaccacaggtgtacaccctgcccccatcccgggaggagatgaccaagaaccaggtcagcctgacctgcctggtcaaaggcttctatcccagcgacatcgccgtggagtgggagagcaatgggcagccggagaacaactacaagaccacgcctcccgtgctggactccgacggctccttcttcctctatagcaagctcaccgtggacaagagcaggtggcagcaggggaacgtcttctcatgctccgtgatgcatgaggctctgcacaaccactacacgcagaagagcctctccctgtctccgggtaaa

SEQ ID NO: 2113 - DNA, 1350 bp, Artificial Sequence
  source: /note="Description of Artificial Sequence: Synthetic polynucleotide"
caggtgcagctggtggagtctgggggaggcgtggtccagcctgggaggtccctgagactctcctgtgcagcatctggattcaccttcagtaactatggcatgcactgggtccgccaggctccaggcgaggggctggagtgggtggcagctatatggtttgatgcaagtgataaatactatgcagactccgtgaagggccgattcaccatctccagagacaactccaagaacacgctgtatctgcaaatgaacagcctgagagccgaggacacggctgtgtattactgtgcgagagatcaggcgatttttggagtggtccccgactactggggccagggaaccctggtcaccgtctcctcagcctccaccaagggcccatcggtcttccccctggcaccctcctccaagagcacctctgggggcacagcggccctgggctgcctggtcaaggactacttccccgaaccggtgacggtgtcgtggaactcaggcgccctgaccagcggcgtgcacaccttcccggctgtcctacagtcctcaggactctactccctcagcagcgtggtgaccgtgccctccagcagcttgggcacccagacctacatctgcaacgtgaatcacaagcccagcaacaccaaggtggacaagaaagttgagcccaaatcttgtgacaaaactcacacatgcccaccgtgcccagcacctgaactcctggggggaccgtcagtcttcctcttccccccaaaacccaaggacaccctcatgatctcccggacccctgaggtcacatgcgtggtggtggacgtgagccacgaagaccctgaggtcaagttcaactggtacgtggacggcgtggaggtgcataatgccaagacaaagccgtgtgaggagcagtacggcagcacgtaccgttgtgtcagcgtcctcaccgtcctgcaccaggactggctgaatggcaaggagtacaagtgcaaggtctccaacaaagccctcccagcccccatcgagaaaaccatctccaaagccaaagggcagccccgagaaccacaggtgtacaccctgcccccatcccgggaggagatgaccaagaaccaggtcagcctgacctgcctggtcaaaggcttctatcccagcgacatcgccgtggagtgggagagcaatgggcagccggagaacaactacaagaccacgcctcccgtgctggactccgacggctccttcttcctctatagcaagctcaccgtggacaagagcaggtggcagcaggggaacgtcttctcatgctccgtgatgcatgaggctctgcacaaccactacacgcagaagagcctctccctgtctccgggtaaa

SEQ ID NO: 2114 - DNA, 1350 bp, Artificial Sequence
  source: /note="Description of Artificial Sequence: Synthetic polynucleotide"
caggtgcagctggtggagtctgggggaggcgtggtccagcctgggaggtccctgagactctcctgtgcagcatctggattcaccttcagtaactatggcatgcactgggtccgccaggctccaggcgaggggctggagtgggtggcagctatatggtttgatggaagtgataaatactatgcagacgccgtgaagggccgattcaccatctccagagacaactccaagaacacgctgtatctgcaaatgaacagcctgagagccgaggacacggctgtgtattactgtgcgagagatcaggcgatttttggagtggtccccgactactggggccagggaaccctggtcaccgtctcctcagcctccaccaagggcccatcggtcttccccctggcaccctcctccaagagcacctctgggggcacagcggccctgggctgcctggtcaaggactacttccccgaaccggtgacggtgtcgtggaactcaggcgccctgaccagcggcgtgcacaccttcccggctgtcctacagtcctcaggactctactccctcagcagcgtggtgaccgtgccctccagcagcttgggcacccagacctacatctgcaacgtgaatcacaagcccagcaacaccaaggtggacaagaaagttgagcccaaatcttgtgacaaaactcacacatgcccaccgtgcccagcacctgaactcctggggggaccgtcagtcttcctcttccccccaaaacccaaggacaccctcatgatctcccggacccctgaggtcacatgcgtggtggtggacgtgagccacgaagaccctgaggtcaagttcaactggtacgtggacggcgtggaggtgcataatgccaagacaaagccgtgtgaggagcagtacggcagcacgtaccgttgtgtcagcgtcctcaccgtcctgcaccaggactggctgaatggcaaggagtacaagtgcaaggtctccaacaaagccctcccagcccccatcgagaaaaccatctccaaagccaaagggcagccccgagaaccacaggtgtacaccctgcccccatcccgggaggagatgaccaagaaccaggtcagcctgacctgcctggtcaaaggcttctatcccagcgacatcgccgtggagtgggagagcaatgggcagccggagaacaactacaagaccacgcctcccgtgctggactccgacggctccttcttcctctatagcaagctcaccgtggacaagagcaggtggcagcaggggaacgtcttctcatgctccgtgatgcatgaggctctgcacaaccactacacgcagaagagcctctccctgtctccgggtaaa

SEQ ID NO: 2115 - DNA, 1350 bp, Artificial Sequence; identical to SEQ ID NO: 2112
  source: /note="Description of Artificial Sequence: Synthetic polynucleotide"

SEQ ID NO: 2116 - DNA, 1350 bp, Artificial Sequence
  source: /note="Description of Artificial Sequence: Synthetic polynucleotide"
caggtgcagctggtggagtctgggggaggcgtggtccagcctgggaggtccctgagactctcctgtgcagcatctggattcaccttcagtaactatggcatgcactgggtccgccaggctccaggcaaggggctggagtgggtggcagctatatggtttgatgcaagtgataaatactatgcagacgccgtgaagggccgattcaccatctccagagacaactccaagaacacgctgtatctgcaaatgaacagcctgagagccgaggacacggctgtgtattactgtgcgagagatcaggcgatttttggagtggtccccgactactggggccagggaaccctggtcaccgtctcctcagcctccaccaagggcccatcggtcttccccctggcaccctcctccaagagcacctctgggggcacagcggccctgggctgcctggtcaaggactacttccccgaaccggtgacggtgtcgtggaactcaggcgccctgaccagcggcgtgcacaccttcccggctgtcctacagtcctcaggactctactccctcagcagcgtggtgaccgtgccctccagcagcttgggcacccagacctacatctgcaacgtgaatcacaagcccagcaacaccaaggtggacaagaaagttgagcccaaatcttgtgacaaaactcacacatgcccaccgtgcccagcacctgaactcctggggggaccgtcagtcttcctcttccccccaaaacccaaggacaccctcatgatctcccggacccctgaggtcacatgcgtggtggtggacgtgagccacgaagaccctgaggtcaagttcaactggtacgtggacggcgtggaggtgcataatgccaagacaaagccgtgtgaggagcagtacggcagcacgtaccgttgtgtcagcgtcctcaccgtcctgcaccaggactggctgaatggcaaggagtacaagtgcaaggtctccaacaaagccctcccagcccccatcgagaaaaccatctccaaagccaaagggcagccccgagaaccacaggtgtacaccctgcccccatcccgggaggagatgaccaagaaccaggtcagcctgacctgcctggtcaaaggcttctatcccagcgacatcgccgtggagtgggagagcaatgggcagccggagaacaactacaagaccacgcctcccgtgctggactccgacggctccttcttcctctatagcaagctcaccgtggacaagagcaggtggcagcaggggaacgtcttctcatgctccgtgatgcatgaggctctgcacaaccactacacgcagaagagcctctccctgtctccgggtaaa

SEQ ID NO: 2117 - DNA, 1350 bp, Artificial Sequence; identical to SEQ ID NO: 2116
  source: /note="Description of Artificial Sequence: Synthetic polynucleotide"

SEQ ID NO: 2118 - DNA, 1350 bp, Artificial Sequence; identical to SEQ ID NO: 2112
  source: /note="Description of Artificial Sequence: Synthetic polynucleotide"

SEQ ID NO: 2119 - DNA, 1350 bp, Artificial Sequence; identical to SEQ ID NO: 2116
  source: /note="Description of Artificial Sequence: Synthetic polynucleotide"

SEQ ID NO: 2120 - DNA, 1368 bp, Artificial Sequence
  source: /note="Description of Artificial Sequence: Synthetic polynucleotide"
caggtgcagttgcaggagtcgggcccaggactggtgaagccttcagagaccctgtccctcacctgcactgtctctggtgactccatcagcagtggtggttactactggagctggatccgccagcccccagggaagggcctggagtggattgggtacatctattacagtgggagcacctactacaacccgtccctcaagagtcgagttaccatatcagtagacacgtctaagaaccagttctccctgaagctgagctctgtgactgccgcggacacggccgtgtattactgtgcgagagatcgtattacgatttttggagtggttatggggggcggtatggacgtctggggccaagggaccacggtcaccgtctcctcagcctccaccaagggcccatcggtcttccccctggcaccctcctccaagagcacctctgggggcacagcggccctgggctgcctggtcaaggactacttccccgaaccggtgacggtgtcgtggaactcaggcgccctgaccagcggcgtgcacaccttcccggctgtcctacagtcctcaggactctactccctcagcagcgtggtgaccgtgccctccagcagcttgggcacccagacctacatctgcaacgtgaatcacaagcccagcaacaccaaggtggacaagaaagttgagcccaaatcttgtgacaaaactcacacatgcccaccgtgcccagcacctgaactcctggggggaccgtcagtcttcctcttccccccaaaacccaaggacaccctcatgatctcccggacccctgaggtcacatgcgtggtggtggacgtgagccacgaagaccctgaggtcaagttcaactggtacgtggacggcgtggaggtgcataatgccaagacaaagccgtgtgaggagcagtacggcagcacgtaccgttgtgtcagcgtcctcaccgtcctgcaccaggactggctgaatggcaaggagtacaagtgcaaggtctccaacaaagccctcccagcccccatcgagaaaaccatctccaaagccaaagggcagccccgagaaccacaggtgtacaccctgcccccatcccgggaggagatgaccaagaaccaggtcagcctgacctgcctggtcaaaggcttctatcccagcgacatcgccgtggagtgggagagcaatgggcagccggagaacaactacaagaccacgcctcccgtgctggactccgacggctccttcttcctctatagcaagctcaccgtggacaagagcaggtggcagcaggggaacgtcttctcatgctccgtgatgcatgaggctctgcacaaccactacacgcagaagagcctctccctgtctccgggtaaa

SEQ ID NO: 2121 - DNA, 1368 bp, Artificial Sequence; identical to SEQ ID NO: 2120
  source: /note="Description of Artificial Sequence: Synthetic polynucleotide"

SEQ ID NO: 2122 - DNA, 1368 bp, Artificial Sequence
  source: /note="Description of Artificial Sequence: Synthetic polynucleotide"
caggtgcagttgcaggagtcgggcccaggactggtgaagccttcacagaccctgtccctcacctgcactgtctctggtgactccatcagcagtggtggttactactggagctggatccgccagcccccagggaagggcctggagtggattgggtacatctattacagtgggagcacctactacaacccgtccctcaagagtcgagttaccatatcagtagacacgtctaagaaccagttctccctgaagctgagctctgtgactgccgcggacacggccgtgtattactgtgcgagagatcgtattacgatttttggagtggttatggggggcggtatggacgtctggggccaagggaccacggtcaccgtctcctcagcctccaccaagggcccatcggtcttccccctggcaccctcctccaagagcacctctgggggcacagcggccctgggctgcctggtcaaggactacttccccgaaccggtgacggtgtcgtggaactcaggcgccctgaccagcggcgtgcacaccttcccggctgtcctacagtcctcaggactctactccctcagcagcgtggtgaccgtgccctccagcagcttgggcacccagacctacatctgcaacgtgaatcacaagcccagcaacaccaaggtggacaagaaagttgagcccaaatcttgtgacaaaactcacacatgcccaccgtgcccagcacctgaactcctggggggaccgtcagtcttcctcttccccccaaaacccaaggacaccctcatgatctcccggacccctgaggtcacatgcgtggtggtggacgtgagccacgaagaccctgaggtcaagttcaactggtacgtggacggcgtggaggtgcataatgccaagacaaagccgtgtgaggagcagtacggcagcacgtaccgttgtgtcagcgtcctcaccgtcctgcaccaggactggctgaatggcaaggagtacaagtgcaaggtctccaacaaagccctcccagcccccatcgagaaaaccatctccaaagccaaagggcagccccgagaaccacaggtgtacaccctgcccccatcccgggaggagatgaccaagaaccaggtcagcctgacctgcctggtcaaaggcttctatcccagcgacatcgccgtggagtgggagagcaatgggcagccggagaacaactacaagaccacgcctcccgtgctggactccgacggctccttcttcctctatagcaagctcaccgtggacaagagcaggtggcagcaggggaacgtcttctcatgctccgtgatgcatgaggctctgcacaaccactacacgcagaagagcctctccctgtctccgggtaaa

SEQ ID NO: 2123 - DNA, 1368 bp, Artificial Sequence
  source: /note="Description of Artificial Sequence: Synthetic polynucleotide"
caggtgcagttgcaggagtcgggcccaggactggtgaagccttcagagaccctgtccctcacctgcactgtctctggtgactccatcagcagtggtggttactactggagctggatccgccagcacccagggaagggcctggagtggattgggtacatctattacagtgggagcacctactacaacccgtccctcaagagtcgagttaccatatcagtagacacgtctaagaaccagttctccctgaagctgagctctgtgactgccgcggacacggccgtgtattactgtgcgagagatcgtattacgatttttggagtggttatggggggcggtatggacgtctggggccaagggaccacggtcaccgtctcctcagcctccaccaagggcccatcggtcttccccctggcaccctcctccaagagcacctctgggggcacagcggccctgggctgcctggtcaaggactacttccccgaaccggtgacggtgtcgtggaactcaggcgccctgaccagcggcgtgcacaccttcccggctgtcctacagtcctcaggactctactccctcagcagcgtggtgaccgtgccctccagcagcttgggcacccagacctacatctgcaacgtgaatcacaagcccagcaacaccaaggtggacaagaaagttgagcccaaatcttgtgacaaaactcacacatgcccaccgtgcccagcacctgaactcctggggggaccgtcagtcttcctcttccccccaaaacccaaggacaccctcatgatctcccggacccctgaggtcacatgcgtggtggtggacgtgagccacgaagaccctgaggtcaagttcaactggtacgtggacggcgtggaggtgcataatgccaagacaaagccgtgtgaggagcagtacggcagcacgtaccgttgtgtcagcgtcctcaccgtcctgcaccaggactggctgaatggcaaggagtacaagtgcaaggtctccaacaaagccctcccagcccccatcgagaaaaccatctccaaagccaaagggcagccccgagaaccacaggtgtacaccctgcccccatcccgggaggagatgaccaagaaccaggtcagcctgacctgcctggtcaaaggcttctatcccagcgacatcgccgtggagtgggagagcaatgggcagccggagaacaactacaagaccacgcctcccgtgctggactccgacggctccttcttcctctatagcaagctcaccgtggacaagagcaggtggcagcaggggaacgtcttctcatgctccgtgatgcatgaggctctgcacaaccactacacgcagaagagcctctccctgtctccgggtaaa

SEQ ID NO: 2124 - DNA, 1368 bp, Artificial Sequence; identical to SEQ ID NO: 2050
  source: /note="Description of Artificial Sequence: Synthetic polynucleotide"

SEQ ID NO: 2125 - DNA, 1368 bp, Artificial Sequence; identical to SEQ ID NO: 2123
  source: /note="Description of Artificial Sequence: Synthetic polynucleotide"

SEQ ID NO: 2126 - DNA, 1368 bp, Artificial Sequence; identical to SEQ ID NO: 2122
  source: /note="Description of Artificial Sequence: Synthetic polynucleotide"

SEQ ID NO: 2127 - DNA, 1359 bp, Artificial Sequence
  source: /note="Description of Artificial Sequence: Synthetic polynucleotide"
caggtgcagctggtgcagtctggggctgaggtgaagaagcctggggcctcagtgaaggtctcctgcaaggcttctggatacaccttcaccggctactatatccactgggtgcgacaggcccctggacaagggcttgagtggatggggtggatcaaccctgaaagtggtggcacagactattcacagaggtttcagggcagggtcaccatgaccagggacacgtccatcagcacagcctacatggaactgaacaggctgagatctgacgacacggccgtgtattactgtgcgagagaggccacgatttttggaatggttattgtaccgtttgactactggggccagggaaccctggtcaccgtctcctcagcctccaccaagggcccatcggtcttccccctggcaccctcctccaagagcacctctgggggcacagcggccctgggctgcctggtcaaggactacttccccgaaccggtgacggtgtcgtggaactcaggcgccctgaccagcggcgtgcacaccttcccggctgtcctacagtcctcaggactctactccctcagcagcgtggtgaccgtgccctccagcagcttgggcacccagacctacatctgcaacgtgaatcacaagcccagcaacaccaaggtggacaagaaagttgagcccaaatcttgtgacaaaactcacacatgcccaccgtgcccagcacctgaactcctggggggaccgtcagtcttcctcttccccccaaaacccaaggacaccctcatgatctcccggacccctgaggtcacatgcgtggtggtggacgtgagccacgaagaccctgaggtcaagttcaactggtacgtggacggcgtggaggtgcataatgccaagacaaagccgtgtgaggagcagtacggcagcacgtaccgttgtgtcagcgtcctcaccgtcctgcaccaggactggctgaatggcaaggagtacaagtgcaaggtctccaacaaagccctcccagcccccatcgagaaaaccatctccaaagccaaagggcagccccgagaaccacaggtgtacaccctgcccccatcccgggaggagatgaccaagaaccaggtcagcctgacctgcctggtcaaaggcttctatcccagcgacatcgccgtggagtgggagagcaatgggcagccggagaacaactacaagaccacgcctcccgtgctggactccgacggctccttcttcctctatagcaagctcaccgtggacaagagcaggtggcagcaggggaacgtcttctcatgctccgtgatgcatgaggctctgcacaaccactacacgcagaagagcctctccctgtctccgggtaaa

SEQ ID NO: 2128 - DNA, 1359 bp, Artificial Sequence
  source: /note="Description of Artificial Sequence: Synthetic polynucleotide"
caggtgccgctggtgcagtctggggctgaggtgaagaagcctggggcctcagtgaaggtctcctgcaaggcttctggatacaccttcaccggctactatatccactgggtgcgacaggcccctggacaagggcttgagtggatggggtggatcaaccctgaaagtggtggcacagactattcacagaggtttcagggcaggttcaccatgaccagggacacgtccatcagcacagcctacatggaactgaacaggctgagatctgacgacacggccgtgtattactgtgcgagagaggccacgatttttggaatggttattgtaccgtttgactactggggccagggaaccctggtcaccgtctcctcagcctccaccaagggcccatcggtcttccccctggcaccctcctccaagagcacctctgggggcacagcggccctgggctgcctggtcaaggactacttccccgaaccggtgacggtgtcgtggaactcaggcgccctgaccagcggcgtgcacaccttcccggctgtcctacagtcctcaggactctactccctcagcagcgtggtgaccgtgccctccagcagcttgggcacccagacctacatctgcaacgtgaatcacaagcccagcaacaccaaggtggacaagaaagttgagcccaaatcttgtgacaaaactcacacatgcccaccgtgcccagcacctgaactcctggggggaccgtcagtcttcctcttccccccaaaacccaaggacaccctcatgatctcccggacccctgaggtcacatgcgtggtggtggacgtgagccacgaagaccctgaggtcaagttcaactggtacgtggacggcgtggaggtgcataatgccaagacaaagccgtgtgaggagcagtacggcagcacgtaccgttgtgtcagcgtcctcaccgtcctgcaccaggactggctgaatggcaaggagtacaagtgcaaggtctccaacaaagccctcccagcccccatcgagaaaaccatctccaaagccaaagggcagccccgagaaccacaggtgtacaccctgcccccatcccgggaggagatgaccaagaaccaggtcagcctgacctgcctggtcaaaggcttctatcccagcgacatcgccgtggagtgggagagcaatgggcagccggagaacaactacaagaccacgcctcccgtgctggactccgacggctccttcttcctctatagcaagctcaccgtggacaagagcaggtggcagcaggggaacgtcttctcatgctccgtgatgcatgaggctctgcacaaccactacacgcagaagagcctctccctgtctccgggtaaa

SEQ ID NO: 2129 - DNA, 1359 bp, Artificial Sequence
  source: /note="Description of Artificial Sequence: Synthetic polynucleotide"
caggtgcagctggtgcagtctggggctgaggtgaagaagcctggggcctcagtgaaggtctcctgcaaggcttctggatacaccttcaccggctactatatccactgggtgcgacaggcccctggacaagggcttgagtggatggggtggatcaaccctgacgctggtggcacagactattcacagaggtttcagggcagggtcaccatgaccagggacacgtccatcagcacagcctacatggaactgaacaggctgagatctgacgacacggccgtgtattactgtgcgagagaggccacgatttttggaatggttattgtaccgtttgactactggggccagggaaccctggtcaccgtctcctcagcctccaccaagggcccatcggtcttccccctggcaccctcctccaagagcacctctgggggcacagcggccctgggctgcctggtcaaggactacttccccgaaccggtgacggtgtcgtggaactcaggcgccctgaccagcggcgtgcacaccttcccggctgtcctacagtcctcaggactctactccctcagcagcgtggtgaccgtgccctccagcagcttgggcacccagacctacatctgcaacgtgaatcacaagcccagcaacaccaaggtggacaagaaagttgagcccaaatcttgtgacaaaactcacacatgcccaccgtgcccagcacctgaactcctggggggaccgtcagtcttcctcttccccccaaaacccaaggacaccctcatgatctcccggacccctgaggtcacatgcgtggtggtggacgtgagccacgaagaccctgaggtcaagttcaactggtacgtggacggcgtggaggtgcataatgccaagacaaagccgtgtgaggagcagtacggcagcacgtaccgttgtgtcagcgtcctcaccgtcctgcaccaggactggctgaatggcaaggagtacaagtgcaaggtctccaacaaagccctcccagcccccatcgagaaaaccatctccaaagccaaagggcagccccgagaaccacaggtgtacaccctgcccccatcccgggaggagatgaccaagaaccaggtcagcctgacctgcctggtcaaaggcttctatcccagcgacatcgccgtggagtgggagagcaatgggcagccggagaacaactacaagaccacgcctcccgtgctggactccgacggctccttcttcctctatagcaagctcaccgtggacaagagcaggtggcagcaggggaacgtcttctcatgctccgtgatgcatgaggctctgcacaaccactacacgcagaagagcctctccctgtctccgggtaaa

SEQ ID NO: 2130 - DNA, 1359 bp, Artificial Sequence
  source: /note="Description of Artificial Sequence: Synthetic polynucleotide"
caggtgccgctggtgcagtctggggctgaggtgaagaagcctggggcctcagtgaaggtctcctgcaaggcttctggatacaccttcaccggctactatatccactgggtgcgacaggcccctggacaagggcttgagtggatggggtggatcaaccctgacgctggtggcacagactattcacagaggtttcagggcaggttcaccatgaccagggacacgtccatcagcacagcctacatggaactgaacaggctgagatctgacgacacggccgtgtattactgtgcgagagaggccacgatttttggaatggttattgtaccgtttgactactggggccagggaaccctggtcaccgtctcctcagcctccaccaagggcccatcggtcttccccctggcaccctcctccaagagcacctctgggggcacagcggccctgggctgcctggtcaaggactacttccccgaaccggtgacggtgtcgtggaactcaggcgccctgaccagcggcgtgcacaccttcccggctgtcctacagtcctcaggactctactccctcagcagcgtggtgaccgtgccctccagcagcttgggcacccagacctacatctgcaacgtgaatcacaagcccagcaacaccaaggtggacaagaaagttgagcccaaatcttgtgacaaaactcacacatgcccaccgtgcccagcacctgaactcctggggggaccgtcagtcttcctcttccccccaaaacccaaggacaccctcatgatctcccggacccctgaggtcacatgcgtggtggtggacgtgagccacgaagaccctgaggtcaagttcaactggtacgtggacggcgtggaggtgcataatgccaagacaaagccgtgtgaggagcagtacggcagcacgtaccgttgtgtcagcgtcctcaccgtcctgcaccaggactggctgaatggcaaggagtacaagtgcaaggtctccaacaaagccctcccagcccccatcgagaaaaccatctccaaagccaaagggcagccccgagaaccacaggtgtacaccctgcccccatcccgggaggagatgaccaagaaccaggtcagcctgacctgcctggtcaaaggcttctatcccagcgacatcgccgtggagtgggagagcaatgggcagccggagaacaactacaagaccacgcctcccgtgctggactccgacggctccttcttcctctatagcaagctcaccgtggacaagagcaggtggcagcaggggaacgtcttctcatgctccgtgatgcatgaggctctgcacaaccactacacgcagaagagcctctccctgtctccgggtaaa

SEQ ID NO: 2131 - DNA, 1359 bp, Artificial Sequence
  source: /note="Description of Artificial Sequence: Synthetic polynucleotide"
caggtgcagctggtgcagtctggggctgaggtgaagaagcctggggcctcagtgaaggtctcctgcaaggcttctggatacaccttcaccggctactatatccactgggtgcgacaggcccctggacaagggcttgagtggatggggtggatcaaccctgacagtggtggcacagactattcacagaggtttcagggcagggtcaccatgaccagggacacgtccatcagcacagcctacatggaactgaacaggctgagatctgacgacacggccgtgtattactgtgcgagagaggccacgatttttggaatggttattgtaccgtttgactactggggccagggaaccctggtcaccgtctcctcagcctccaccaagggcccatcggtcttccccctggcaccctcctccaagagcacctctgggggcacagcggccctgggctgcctggtcaaggactacttccccgaaccggtgacggtgtcgtggaactcaggcgccctgaccagcggcgtgcacaccttcccggctgtcctacagtcctcaggactctactccctcagcagcgtggtgaccgtgccctccagcagcttgggcacccagacctacatctgcaacgtgaatcacaagcccagcaacaccaaggtggacaagaaagttgagcccaaatcttgtgacaaaactcacacatgcccaccgtgcccagcacctgaactcctggggggaccgtcagtcttcctcttccccccaaaacccaaggacaccctcatgatctcccggacccctgaggtcacatgcgtggtggtggacgtgagccacgaagaccctgaggtcaagttcaactggtacgtggacggcgtggaggtgcataatgccaagacaaagccgtgtgaggagcagtacggcagcacgtaccgttgtgtcagcgtcctcaccgtcctgcaccaggactggctgaatggcaaggagtacaagtgcaaggtctccaacaaagccctcccagcccccatcgagaaaaccatctccaaagccaaagggcagccccgagaaccacaggtgtacaccctgcccccatcccgggaggagatgaccaagaaccaggtcagcctgacctgcctggtcaaaggcttctatcccagcgacatcgccgtggagtgggagagcaatgggcagccggagaacaactacaagaccacgcctcccgtgctggactccgacggctccttcttcctctatagcaagctcaccgtggacaagagcaggtggcagcaggggaacgtcttctcatgctccgtgatgcatgaggctctgcacaaccactacacgcagaagagcctctccctgtctccgggtaaa

SEQ ID NO: 2132 - DNA, 1359 bp, Artificial Sequence
  source: /note="Description of Artificial Sequence: Synthetic polynucleotide"
caggtgcagctggtgcagtctggggctgaggtgaagaagcctggggcctcagtgaaggtctcctgcaaggcttctggatacaccttcaccggctactatatccactgggtgcgacaggcccctggacaagggcttgagtggatggggtggatcaaccctgacagtggtggcacagactattcacagaggtttcagggcaggttcaccatgaccagggacacgtccatcagcacagcctacatggaactgaacaggctgagatctgacgacacggccgtgtattactgtgcgagagaggccacgatttttggaatggttattgtaccgtttgactactggggccagggaaccctggtcaccgtctcctcagcctccaccaagggcccatcggtcttccccctggcaccctcctccaagagcacctctgggggcacagcggccctgggctgcctggtcaaggactacttccccgaaccggtgacggtgtcgtggaactcaggcgccctgaccagcggcgtgcacaccttcccggctgtcctacagtcctcaggactctactccctcagcagcgtggtgaccgtgccctccagcagcttgggcacccagacctacatctgcaacgtgaatcacaagcccagcaacaccaaggtggacaagaaagttgagcccaaatcttgtgacaaaactcacacatgcccaccgtgcccagcacctgaactcctggggggaccgtcagtcttcctcttccccccaaaacccaaggacaccctcatgatctcccggacccctgaggtcacatgcgtggtggtggacgtgagccacgaagaccctgaggtcaagttcaactggtacgtggacggcgtggaggtgcataatgccaagacaaagccgtgtgaggagcagtacggcagcacgtaccgttgtgtcagcgtcctcaccgtcctgcaccaggactggctgaatggcaaggagtacaagtgcaaggtctccaacaaagccctcccagcccccatcgagaaaaccatctccaaagccaaagggcagccccgagaaccacaggtgtacaccctgcccccatcccgggaggagatgaccaagaaccaggtcagcctgacctgcctggtcaaaggcttctatcccagcgacatcgccgtggagtgggagagcaatgggcagccggagaacaactacaagaccacgcctcccgtgctggactccgacggctccttcttcctctatagcaagctcaccgtggacaagagcaggtggcagcaggggaacgtcttctcatgctccgtgatgcatgaggctctgcacaaccactacacgcagaagagcctctccctgtctccgggtaaa

SEQ ID NO: 2133 - DNA, 1359 bp, Artificial Sequence
  source: /note="Description of Artificial Sequence: Synthetic polynucleotide"
caggtgccgctggtgcagtctggggctgaggtgaagaagcctggggcctcagtgaaggtctcctgcaaggcttctggatacaccttcaccggctactatatccactgggtgcgacaggcccctggacaagggcttgagtggatggggtggatcaaccctgacagtggtggcacagactattcacagaggtttcagggcagggtcaccatgaccagggacacgtccatcagcacagcctacatggaactgaacaggctgagatctgacgacacggccgtgtattactgtgcgagagaggccacgatttttggaatggttattgtaccgtttgactactggggccagggaaccctggtcaccgtctcctcagcctccaccaagggcccatcggtcttccccctggcaccctcctccaagagcacctctgggggcacagcggccctgggctgcctggtcaaggactacttccccgaaccggtgacggtgtcgtggaactcaggcgccctgaccagcggcgtgcacaccttcccggctgtcctacagtcctcaggactctactccctcagcagcgtggtgaccgtgccctccagcagcttgggcacccagacctacatctgcaacgtgaatcacaagcccagcaacaccaaggtggacaagaaagttgagcccaaatcttgtgacaaaactcacacatgcccaccgtgcccagcacctgaactcctggggggaccgtcagtcttcctcttccccccaaaacccaaggacaccctcatgatctcccggacccctgaggtcacatgcgtggtggtggacgtgagccacgaagaccctgaggtcaagttcaactggtacgtggacggcgtggaggtgcataatgccaagacaaagccgtgtgaggagcagtacggcagcacgtaccgttgtgtcagcgtcctcaccgtcctgcaccaggactggctgaatggcaaggagtacaagtgcaaggtctccaacaaagccctcccagcccccatcgagaaaaccatctccaaagccaaagggcagccccgagaaccacaggtgtacaccctgcccccatcccgggaggagatgaccaagaaccaggtcagcctgacctgcctggtcaaaggcttctatcccagcgacatcgccgtggagtgggagagcaatgggcagccggagaacaactacaagaccacgcctcccgtgctggactccgacggctccttcttcctctatagcaagctcaccgtggacaagagcaggtggcagcaggggaacgtcttctcatgctccgtgatgcatgaggctctgcacaaccactacacgcagaagagcctctccctgtctccgggtaaa

SEQ ID NO: 2134 - DNA, 1359 bp, Artificial Sequence
  source: /note="Description of Artificial Sequence: Synthetic polynucleotide"
caggtgcagctggtgcagtctggggctgaggtgaagaagcctggggcctcagtgaaggtctcctgcaaggcttctggatacaccttcaccggctactatatccactgggtgcgacaggcccctggacaagggcttgagtggatggggtggatcaaccctgacgctggtggcacagactattcacagaggtttcagggcaggttcaccatgaccagggacacgtccatcagcacagcctacatggaactgaacaggctgagatctgacgacacggccgtgtattactgtgcgagagaggccacgatttttggaatggttattgtaccgtttgactactggggccagggaaccctggtcaccgtctcctcagcctccaccaagggcccatcggtcttccccctggcaccctcctccaagagcacctctgggggcacagcggccctgggctgcctggtcaaggactacttccccgaaccggtgacggtgtcgtggaactcaggcgccctgaccagcggcgtgcacaccttcccggctgtcctacagtcctcaggactctactccctcagcagcgtggtgaccgtgccctccagcagcttgggcacccagacctacatctgcaacgtgaatcacaagcccagcaacaccaaggtggacaagaaagttgagcccaaatcttgtgacaaaactcacacatgcccaccgtgcccagcacctgaactcctggggggaccgtcagtcttcctcttccccccaaaacccaaggacaccctcatgatctcccggacccctgaggtcacatgcgtggtggtggacgtgagccacgaagaccctgaggtcaagttcaactggtacgtggacggcgtggaggtgcataatgccaagacaaagccgtgtgaggagcagtacggcagcacgtaccgttgtgtcagcgtcctcaccgtcctgcaccaggactggctgaatggcaaggagtacaagtgcaaggtctccaacaaagccctcccagcccccatcgagaaaaccatctccaaagccaaagggcagccccgagaaccacaggtgtacaccctgcccccatcccgggaggagatgaccaagaaccaggtcagcctgacctgcctggtcaaaggcttctatcccagcgacatcgccgtggagtgggagagcaatgggcagccggagaacaactacaagaccacgcctcccgtgctggactccgacggctccttcttcctctatagcaagctcaccgtggacaagagcaggtggcagcaggggaacgtcttctcatgctccgtgatgcatgaggctctgcacaaccactacacgcagaagagcctctccctgtctccgggtaaa

SEQ ID NO: 2135 - DNA, 1359 bp, Artificial Sequence
  source: /note="Description of Artificial Sequence: Synthetic polynucleotide"
caggtgccgctggtgcagtctggggctgaggtgaagaagcctggggcctcagtgaaggtctcctgcaaggcttctggatacaccttcaccggctactatatccactgggtgcgacaggcccctggacaagggcttgagtggatggggtggatcaaccctgacgctggtggcacagactattcacagaggtttcagggcagggtcaccatgaccagggacacgtccatcagcacagcctacatggaactgaacaggctgagatctgacgacacggccgtgtattactgtgcgagagaggccacgatttttggaatggttattgtaccgtttgactactggggccagggaaccctggtcaccgtctcctcagcctccaccaagggcccatcggtcttccccctggcaccctcctccaagagcacctctgggggcacagcggccctgggctgcctggtcaaggactacttccccgaaccggtgacggtgtcgtggaactcaggcgccctgaccagcggcgtgcacaccttcccggctgtcctacagtcctcaggactctactccctcagcagcgtggtgaccgtgccctccagcagcttgggcacccagacctacatctgcaacgtgaatcacaagcccagcaacaccaaggtggacaagaaagttgagcccaaatcttgtgacaaaactcacacatgcccaccgtgcccagcacctgaactcctggggggaccgtcagtcttcctcttccccccaaaacccaaggacaccctcatgatctcccggacccctgaggtcacatgcgtggtggtggacgtgagccacgaagaccctgaggtcaagttcaactggtacgtggacggcgtggaggtgcataatgccaagacaaagccgtgtgaggagcagtacggcagcacgtaccgttgtgtcagcgtcctcaccgtcctgcaccaggactggctgaatggcaaggagtacaagtgcaaggtctccaacaaagccctcccagcccccatcgagaaaaccatctccaaagccaaagggcagccccgagaaccacaggtgtacaccctgcccccatcccgggaggagatgaccaagaaccaggtcagcctgacctgcctggtcaaaggcttctatcccagcgacatcgccgtggagtgggagagcaatgggcagccggagaacaactacaagaccacgcctcccgtgctggactccgacggctccttcttcctctatagcaagctcaccgtggacaagagcaggtggcagcaggggaacgtcttctcatgctccgtgatgcatgaggctctgcacaaccactacacgcagaagagcctctccctgtctccgggtaaa

SEQ ID NO: 2136 - DNA, 1359 bp, Artificial Sequence
  source: /note="Description of Artificial Sequence: Synthetic polynucleotide"
caggtgcagctggtgcagtctggggctgaggtgaagaagcctggggcctcagtgaaggtctcctgcaaggcttctggatacaccttcaccggctactatatccactgggtgcgacaggcccctggacaagggcttgagtggatggggtggatcaaccctgacgctggtggcacagactattcacagaggtttcagggcagggtcaccatgaccagggacacgtccatcagcacagcctacatggaactgaacagcctgagatctgacgacacggccgtgtattactgtgcgagagaggccacgatttttggaatggttattgtaccgtttgactactggggccagggaaccctggtcaccgtctcctcagcctccaccaagggcccatcggtcttccccctggcaccctcctccaagagcacctctgggggcacagcggccctgggctgcctggtcaaggactacttccccgaaccggtgacggtgtcgtggaactcaggcgccctgaccagcggcgtgcacaccttcccggctgtcctacagtcctcaggactctactccctcagcagcgtggtgaccgtgccctccagcagcttgggcacccagacctacatctgcaacgtgaatcacaagcccagcaacaccaaggtggacaagaaagttgagcccaaatcttgtgacaaaactcacacatgcccaccgtgcccagcacctgaactcctggggggaccgtcagtcttcctcttccccccaaaacccaaggacaccctcatgatctcccggacccctgaggtcacatgcgtggtggtggacgtgagccacgaagaccctgaggtcaagttcaactggtacgtggacggcgtggaggtgcataatgccaagacaaagccgtgtgaggagcagtacggcagcacgtaccgttgtgtcagcgtcctcaccgtcctgcaccaggactggctgaatggcaaggagtacaagtgcaaggtctccaacaaagccctcccagcccccatcgagaaaaccatctccaaagccaaagggcagccccgagaaccacaggtgtacaccctgcccccatcccgggaggagatgaccaagaaccaggtcagcctgacctgcctggtcaaaggcttctatcccagcgacatcgccgtggagtgggagagcaatgggcagccggagaacaactacaagaccacgcctcccgtgctggactccgacggctccttcttcctctatagcaagctcaccgtggacaagagcaggtggcagcaggggaacgtcttctcatgctccgtgatgcatgaggctctgcacaaccactacacgcagaagagcctctccctgtctccgggtaaa

SEQ ID NO: 2137 - DNA, 1359 bp, Artificial Sequence
  source: /note="Description of Artificial Sequence: Synthetic polynucleotide"
caggtgcagctggtgcagtctggggctgaggtgaagaagcctggggcctcagtgaaggtctcctgcaaggcttctggatacaccttcaccggctactatatccactgggtgcgacaggcccctggacaagggcttgagtggatggggtggatcaaccctgaaagtggtggcacagactattcacagaggtttcagggcagggtcaccatgaccagggacacgtccatcagcacagcctacatggaactgaacagcctgagatctgacgacacggccgtgtattactgtgcgagagaggccacgatttttggaatggttattgtaccgtttgactactggggccagggaaccctggtcaccgtctcctcagcctccaccaagggcccatcggtcttccccctggcaccctcctccaagagcacctctgggggcacagcggccctgggctgcctggtcaaggactacttccccgaaccggtgacggtgtcgtggaactcaggcgccctgaccagcggcgtgcacaccttcccggctgtcctacagtcctcaggactctactccctcagcagcgtggtgaccgtgccctccagcagcttgggcacccagacctacatctgcaacgtgaatcacaagcccagcaacaccaaggtggacaagaaagttgagcccaaatcttgtgacaaaactcacacatgcccaccgtgcccagcacctgaactcctggggggaccgtcagtcttcctcttccccccaaaacccaaggacaccctcatgatctcccggacccctgaggtcacatgcgtggtggtggacgtgagccacgaagaccctgaggtcaagttcaactggtacgtggacggcgtggaggtgcataatgccaagacaaagccgtgtgaggagcagtacggcagcacgtaccgttgtgtcagcgtcctcaccgtcctgcaccaggactggctgaatggcaaggagtacaagtgcaaggtctccaacaaagccctcccagcccccatcgagaaaaccatctccaaagccaaagggcagccccgagaaccacaggtgtacaccctgcccccatcccgggaggagatgaccaagaaccaggtcagcctgacctgcctggtcaaaggcttctatcccagcgacatcgccgtggagtgggagagcaatgggcagccggagaacaactacaagaccacgcctcccgtgctggactccgacggctccttcttcctctatagcaagctcaccgtggacaagagcaggtggcagcaggggaacgtcttctcatgctccgtgatgcatgaggctctgcacaaccactacacgcagaagagcctctccctgtctccgggtaaa

SEQ ID NO: 2138 - DNA, 1359 bp, Artificial Sequence
  source: /note="Description of Artificial Sequence: Synthetic polynucleotide"
caggtgccgctggtacagtctggggctgaggtgaagaagcctggggcctcagtgaaggtctcctgcaaggcttctggatacaccttcaccggctactatatacactgggtgcgtcaggcccctggacaagggcttgtgtggatggggtggatcagccctaacagtggtgaaacaagctatgcacagaagtttcaggacagggtcaccatgaccagggacacgtccatcagcacagcctatatggagctgagcagactgagatctgacgacacggccgtgtatttctgtgcgagagaggccacgatttttggaatgcttattgtaccatttgactactggggccagggaaccctggtcaccgtctcctcagcctccaccaagggcccatcggtcttccccctggcaccctcctccaagagcacctctgggggcacagcggccctgggctgcctggtcaaggactacttccccgaaccggtgacggtgtcgtggaactcaggcgccctgaccagcggcgtgcacaccttcccggctgtcctacagtcctcaggactctactccctcagcagcgtggtgaccgtgccctccagcagcttgggcacccagacctacatctgcaacgtgaatcacaagcccagcaacaccaaggtggacaagaaagttgagcccaaatcttgtgacaaaactcacacatgcccaccgtgcccagcacctgaactcctggggggaccgtcagtcttcctcttccccccaaaacccaaggacaccctcatgatctcccggacccctgaggtcacatgcgtggtggtggacgtgagccacgaagaccctgaggtcaagttcaactggtacgtggacggcgtggaggtgcataatgccaagacaaagccgtgtgaggagcagtacggcagcacgtaccgttgtgtcagcgtcctcaccgtcctgcaccaggactggctgaatggcaaggagtacaagtgcaaggtctccaacaaagccctcccagcccccatcgagaaaaccatctccaaagccaaagggcagccccgagaaccacaggtgtacaccctgcccccatcccgggaggagatgaccaagaaccaggtcagcctgacctgcctggtcaaaggcttctatcccagcgacatcgccgtggagtgggagagcaatgggcagccggagaacaactacaagaccacgcctcccgtgctggactccgacggctccttcttcctctatagcaagctcaccgtggacaagagcaggtggcagcaggggaacgtcttctcatgctccgtgatgcatgaggctctgcacaaccactacacgcagaagagcctctccctgtctccgggtaaa

SEQ ID NO: 2139 - DNA, 1359 bp, Artificial Sequence
  source: /note="Description of Artificial Sequence: Synthetic polynucleotide"
caggtgccgctggtacagtctggggctgaggtgaagaagcctggggcctcagtgaaggtctcctgcaaggcttctggatacaccttcaccggctactatatacactgggtgcgtcaggcccctggacaagggcttgtgtggatggggtggatcagccctaacagtggtgacacaagctatgcacagaagtttcaggacagggtcaccatgaccagggacacgtccatcagcacagcctatatggagctgagcagactgagatctgacgacacggccgtgtatttctgtgcgagagaggccacgatttttggaatgcttattgtaccatttgactactggggccagggaaccctggtcaccgtctcctcagcctccaccaagggcccatcggtcttccccctggcaccctcctccaagagcacctctgggggcacagcggccctgggctgcctggtcaaggactacttccccgaaccggtgacggtgtcgtggaactcaggcgccctgaccagcggcgtgcacaccttcccggctgtcctacagtcctcaggactctactccctcagcagcgtggtgaccgtgccctccagcagcttgggcacccagacctacatctgcaacgtgaatcacaagcccagcaacaccaaggtggacaagaaagttgagcccaaatcttgtgacaaaactcacacatgcccaccgtgcccagcacctgaactcctggggggaccgtcagtcttcctcttccccccaaaacccaaggacaccctcatgatctcccggacccctgaggtcacatgcgtggtggtggacgtgagccacgaagaccctgaggtcaagttcaactggtacgtggacggcgtggaggtgcataatgccaagacaaagccgtgtgaggagcagtacggcagcacgtaccgttgtgtcagcgtcctcaccgtcctgcaccaggactggctgaatggcaaggagtacaagtgcaaggtctccaacaaagccctcccagcccccatcgagaaaaccatctccaaagccaaagggcagccccgagaaccacaggtgtacaccctgcccccatcccgggaggagatgaccaagaaccaggtcagcctgacctgcctggtcaaaggcttctatcccagcgacatcgccgtggagtgggagagcaatgggcagccggagaacaactacaagaccacgcctcccgtgctggactccgacggctccttcttcctctatagcaagctcaccgtggacaagagcaggtggcagcaggggaacgtcttctcatgctccgtgatgcatgaggctctgcacaaccactacacgcagaagagcctctccctgtctccgggtaaa

SEQ ID NO: 2140 - DNA, 1359 bp, Artificial Sequence; identical to SEQ ID NO: 2138
  source: /note="Description of Artificial Sequence: Synthetic polynucleotide"

SEQ ID NO: 2141 - DNA, 1359 bp, Artificial Sequence
  source: /note="Description of Artificial Sequence: Synthetic polynucleotide"
caggtgccgctggtacagtctggggctgaggtgaagaagcctggggcctcagtgaaggtctcctgcaaggcttctggatacaccttcaccggctactatatacactgggtgcgtcaggcccctggacaagggcttgtgtggatggggtggatcagccctaacagtggtgaaacaagctatgcacagaagtttcaggacagggtcaccatgaccagggacacgtccatcagcacagcctatatggagctgagcagactgagatctgacgacacggccgtgtatttctgtacgagagaggccacgatttttggaatgcttattgtaccatttgactactggggccagggaaccctggtcaccgtctcctcagcctccaccaagggcccatcggtcttccccctggcaccctcctccaagagcacctctgggggcacagcggccctgggctgcctggtcaaggactacttccccgaaccggtgacggtgtcgtggaactcaggcgccctgaccagcggcgtgcacaccttcccggctgtcctacagtcctcaggactctactccctcagcagcgtggtgaccgtgccctccagcagcttgggcacccagacctacatctgcaacgtgaatcacaagcccagcaacaccaaggtggacaagaaagttgagcccaaatcttgtgacaaaactcacacatgcccaccgtgcccagcacctgaactcctggggggaccgtcagtcttcctcttccccccaaaacccaaggacaccctcatgatctcccggacccctgaggtcacatgcgtggtggtggacgtgagccacgaagaccctgaggtcaagttcaactggtacgtggacggcgtggaggtgcataatgccaagacaaagccgtgtgaggagcagtacggcagcacgtaccgttgtgtcagcgtcctcaccgtcctgcaccaggactggctgaatggcaaggagtacaagtgcaaggtctccaacaaagccctcccagcccccatcgagaaaaccatctccaaagccaaagggcagccccgagaaccacaggtgtacaccctgcccccatcccgggaggagatgaccaagaaccaggtcagcctgacctgcctggtcaaaggcttctatcccagcgacatcgccgtggagtgggagagcaatgggcagccggagaacaactacaagaccacgcctcccgtgctggactccgacggctccttcttcctctatagcaagctcaccgtggacaagagcaggtggcagcaggggaacgtcttctcatgctccgtgatgcatgaggctctgcacaaccactacacgcagaagagcctctccctgtctccgggtaaa

SEQ ID NO: 2142 - DNA, 1359 bp, Artificial Sequence; identical to SEQ ID NO: 2048
  source: /note="Description of Artificial Sequence: Synthetic polynucleotide"

SEQ ID NO: 2143 - DNA, 1359 bp, Artificial Sequence; identical to SEQ ID NO: 2141
  source: /note="Description of Artificial Sequence: Synthetic polynucleotide"

SEQ ID NO: 2144 - DNA, 1359 bp, Artificial Sequence; identical to SEQ ID NO: 2139
  source: /note="Description of Artificial Sequence: Synthetic polynucleotide"

SEQ ID NO: 2145 - DNA, 1359 bp, Artificial Sequence
  source: /note="Description of Artificial Sequence: Synthetic polynucleotide"
caggtgcagctggtacagtctggggctgaggtgaagaagcctggggcctcagtgaaggtctcctgcaaggcttctggatacaccttcaccggctactatatacactgggtgcgtcaggcccctggacaagggcttgagtggatggggtggatcagccctaacagtggtgaaacaagctatgcacagaagtttcaggacagggtcaccatgaccagggacacgtccatcagcacagcctatatggagctgagcagcctgagatctgacgacacggccgtgtatttctgtgcgagagaggccacgatttttggaatgcttattgtaccatttgactactggggccagggaaccctggtcaccgtctcctcagcctccaccaagggcccatcggtcttccccctggcaccctcctccaagagcacctctgggggcacagcggccctgggctgcctggtcaaggactacttccccgaaccggtgacggtgtcgtggaactcaggcgccctgaccagcggcgtgcacaccttcccggctgtcctacagtcctcaggactctactccctcagcagcgtggtgaccgtgccctccagcagcttgggcacccagacctacatctgcaacgtgaatcacaagcccagcaacaccaaggtggacaagaaagttgagcccaaatcttgtgacaaaactcacacatgcccaccgtgcccagcacctgaactcctggggggaccgtcagtcttcctcttccccccaaaacccaaggacaccctcatgatctcccggacccctgaggtcacatgcgtggtggtggacgtgagccacgaagaccctgaggtcaagttcaactggtacgtggacggcgtggaggtgcataatgccaagacaaagccgtgtgaggagcagtacggcagcacgtaccgttgtgtcagcgtcctcaccgtcctgcaccaggactggctgaatggcaaggagtacaagtgcaaggtctccaacaaagccctcccagcccccatcgagaaaaccatctccaaagccaaagggcagccccgagaaccacaggtgtacaccctgcccccatcccgggaggagatgaccaagaaccaggtcagcctgacctgcctggtcaaaggcttctatcccagcgacatcgccgtggagtgggagagcaatgggcagccggagaacaactacaagaccacgcctcccgtgctggactccgacggctccttcttcctctatagcaagctcaccgtggacaagagcaggtggcagcaggggaacgtcttctcatgctccgtgatgcatgaggctctgcacaaccactacacgcagaagagcctctccctgtctccgggtaaa

SEQ ID NO: 2146 - DNA, 1359 bp, Artificial Sequence
  source: /note="Description of Artificial Sequence: Synthetic polynucleotide"
caggtgcagctggtacagtctggggctgaggtgaagaagcctggggcctcagtgaaggtctcctgcaaggcttctggatacaccttcaccggctactatatacactgggtgcgtcaggcccctggacaagggcttgagtggatggggtggatcagccctaacagtggtgaaacaagctatgcacagaagtttcaggacagggtcaccatgaccagggacacgtccatcagcacagcctatatggagctgagcagactgagatctgacgacacggccgtgtatttctgtgcgagagaggccacgatttttggaatgcttattgtaccatttgactactggggccagggaaccctggtcaccgtctcctcagcctccaccaagggcccatcggtcttccccctggcaccctcctccaagagcacctctgggggcacagcggccctgggctgcctggtcaaggactacttccccgaaccggtgacggtgtcgtggaactcaggcgccctgaccagcggcgtgcacaccttcccggctgtcctacagtcctcaggactctactccctcagcagcgtggtgaccgtgccctccagcagcttgggcacccagacctacatctgcaacgtgaatcacaagcccagcaacaccaaggtggacaagaaagttgagcccaaatcttgtgacaaaactcacacatgcccaccgtgcccagcacctgaactcctggggggaccgtcagtcttcctcttccccccaaaacccaaggacaccctcatgatctcccggacccctgaggtcacatgcgtggtggtggacgtgagccacgaagaccctgaggtcaagttcaactggtacgtggacggcgtggaggtgcataatgccaagacaaagccgtgtgaggagcagtacggcagcacgtaccgttgtgtcagcgtcctcaccgtcctgcaccaggactggctgaatggcaaggagtacaagtgcaaggtctccaacaaagccctcccagcccccatcgagaaaaccatctccaaagccaaagggcagccccgagaaccacaggtgtacaccctgcccccatcccgggaggagatgaccaagaaccaggtcagcctgacctgcctggtcaaaggcttctatcccagcgacatcgccgtggagtgggagagcaatgggcagccggagaacaactacaagaccacgcctcccgtgctggactccgacggctccttcttcctctatagcaagctcaccgtggacaagagcaggtggcagcaggggaacgtcttctcatgctccgtgatgcatgaggctctgcacaaccactacacgcagaagagcctctccctgtctccgggtaaa

SEQ ID NO: 2147 - DNA, 1359 bp, Artificial Sequence
  source: /note="Description of Artificial Sequence: Synthetic polynucleotide"
caggtgccgctggtgcagtctggggctgaggtgaagaagcctggggcctcagtgaaggtctcctgcaaggcttctggatacaccttcaccggctactatatccactgggtgcgacaggcccctggacaaggacttgagtggatggggtggatcaaccctgaaagtggtggcacagactattcacagaggtttcagggcagggtcaccatgaccagggacacgtccatcagcacagcctacatggaactgagcaggctgagatctgacgacacggccgtgtattactgtgcgagagaggccacgatttttggaatggttattgtaccgtttgactactggggccagggaaccctggtcaccgtctcctcagcctccaccaagggcccatcggtcttccccctggcaccctcctccaagagcacctctgggggcacagcggccctgggctgcctggtcaaggactacttccccgaaccggtgacggtgtcgtggaactcaggcgccctgaccagcggcgtgcacaccttcccggctgtcctacagtcctcaggactctactccctcagcagcgtggtgaccgtgccctccagcagcttgggcacccagacctacatctgcaacgtgaatcacaagcccagcaacaccaaggtggacaagaaagttgagcccaaatcttgtgacaaaactcacacatgcccaccgtgcccagcacctgaactcctggggggaccgtcagtcttcctcttccccccaaaacccaaggacaccctcatgatctcccggacccctgaggtcacatgcgtggtggtggacgtgagccacgaagaccctgaggtcaagttcaactggtacgtggacggcgtggaggtgcataatgccaagacaaagccgtgtgaggagcagtacggcagcacgtaccgttgtgtcagcgtcctcaccgtcctgcaccaggactggctgaatggcaaggagtacaagtgcaaggtctccaacaaagccctcccagcccccatcgagaaaaccatctccaaagccaaagggcagccccgagaaccacaggtgtacaccctgcccccatcccgggaggagatgaccaagaaccaggtcagcctgacctgcctggtcaaaggcttctatcccagcgacatcgccgtggagtgggagagcaatgggcagccggagaacaactacaagaccacgcctcccgtgctggactccgacggctccttcttcctctatagcaagctcaccgtggacaagagcaggtggcagcaggggaacgtcttctcatgctccgtgatgcatgaggctctgcacaaccactacacgcagaagagcctctccctgtctccgggtaaa

SEQ ID NO: 2148 - DNA, 1359 bp, Artificial Sequence
  source: /note="Description of Artificial Sequence: Synthetic polynucleotide"
caggtgccgctggtgcagtctggggctgaggtgaagaagcctggggcctcagtgaaggtctcctgcaaggcttctggatacaccttcaccggctactatatccactgggtgcgacaggcccctggacaaggacttgagtggatggggtggatcaaccctgaaagtggtggcacagactattcacagaggtttcagggcaggttcaccatgaccagggacacgtccatcagcacagcctacatggaactgagcaggctgagatctgacgacacggccgtgtattactgtgcgagagaggccacgatttttggaatggttattgtaccgtttgactactggggccagggaaccctggtcaccgtctcctcagcctccaccaagggcccatcggtcttccccctggcaccctcctccaagagcacctctgggggcacagcggccctgggctgcctggtcaaggactacttccccgaaccggtgacggtgtcgtggaactcaggcgccctgaccagcggcgtgcacaccttcccggctgtcctacagtcctcaggactctactccctcagcagcgtggtgaccgtgccctccagcagcttgggcacccagacctacatctgcaacgtgaatcacaagcccagcaacaccaaggtggacaagaaagttgagcccaaatcttgtgacaaaactcacacatgcccaccgtgcccagcacctgaactcctggggggaccgtcagtcttcctcttccccccaaaacccaaggacaccctcatgatctcccggacccctgaggtcacatgcgtggtggtggacgtgagccacgaagaccctgaggtcaagttcaactggtacgtggacggcgtggaggtgcataatgccaagacaaagccgtgtgaggagcagtacggcagcacgtaccgttgtgtcagcgtcctcaccgtcctgcaccaggactggctgaatggcaaggagtacaagtgcaaggtctccaacaaagccctcccagcccccatcgagaaaaccatctccaaagccaaagggcagccccgagaaccacaggtgtacaccctgcccccatcccgggaggagatgaccaagaaccaggtcagcctgacctgcctggtcaaaggcttctatcccagcgacatcgccgtggagtgggagagcaatgggcagccggagaacaactacaagaccacgcctcccgtgctggactccgacggctccttcttcctctatagcaagctcaccgtggacaagagcaggtggcagcaggggaacgtcttctcatgctccgtgatgcatgaggctctgcacaaccactacacgcagaagagcctctccctgtctccgggtaaa

SEQ ID NO: 2149 - DNA, 1359 bp, Artificial Sequence
  source: /note="Description of Artificial Sequence: Synthetic polynucleotide"
caggtgccgctggtgcagtctggggctgaggtgaagaagcctggggcctcagtgaaggtctcctgcaaggcttctggatacaccttcaccggctactatatccactgggtgcgacaggcccctggacaaggacttgagtggatggggtggatcaaccctgacagtggtggcacagactattcacagaggtttcagggcagggtcaccatgaccagggacacgtccatcagcacagcctacatggaactgagcaggctgagatctgacgacacggccgtgtattactgtgcgagagaggccacgatttttggaatggttattgtaccgtttgactactggggccagggaaccctggtcaccgtctcctcagcctccaccaagggcccatcggtcttccccctggcaccctcctccaagagcacctctgggggcacagcggccctgggctgcctggtcaaggactacttccccgaaccggtgacggtgtcgtggaactcaggcgccctgaccagcggcgtgcacaccttcccggctgtcctacagtcctcaggactctactccctcagcagcgtggtgaccgtgccctccagcagcttgggcacccagacctacatctgcaacgtgaatcacaagcccagcaacaccaaggtggacaagaaagttgagcccaaatcttgtgacaaaactcacacatgcccaccgtgcccagcacctgaactcctggggggaccgtcagtcttcctcttccccccaaaacccaaggacaccctcatgatctcccggacccctgaggtcacatgcgtggtggtggacgtgagccacgaagaccctgaggtcaagttcaactggtacgtggacggcgtggaggtgcataatgccaagacaaagccgtgtgaggagcagtacggcagcacgtaccgttgtgtcagcgtcctcaccgtcctgcaccaggactggctgaatggcaaggagtacaagtgcaaggtctccaacaaagccctcccagcccccatcgagaaaaccatctccaaagccaaagggcagccccgagaaccacaggtgtacaccctgcccccatcccgggaggagatgaccaagaaccaggtcagcctgacctgcctggtcaaaggcttctatcccagcgacatcgccgtggagtgggagagcaatgggcagccggagaacaactacaagaccacgcctcccgtgctggactccgacggctccttcttcctctatagcaagctcaccgtggacaagagcaggtggcagcaggggaacgtcttctcatgctccgtgatgcatgaggctctgcacaaccactacacgcagaagagcctctccctgtctccgggtaaa

SEQ ID NO: 2150 - DNA, 1359 bp, Artificial Sequence
  source: /note="Description of Artificial Sequence: Synthetic polynucleotide"
caggtgcagctggtgcagtctggggctgaggtgaagaagcctggggcctcagtgaaggtctcctgcaaggcttctggatacaccttcaccggctactatatccactgggtgcgacaggcccctggacaaggacttgagtggatggggtggatcaaccctgaaagtggtggcacagactattcacagaggtttcagggcagggtcaccatgaccagggacacgtccatcagcacagcctacatggaactgagcagcctgagatctgacgacacggccgtgtattactgtgcgagagaggccacgatttttggaatggttattgtaccgtttgactactggggccagggaaccctggtcaccgtctcctcagcctccaccaagggcccatcggtcttccccctggcaccctcctccaagagcacctctgggggcacagcggccctgggctgcctggtcaaggactacttccccgaaccggtgacggtgtcgtggaactcaggcgccctgaccagcggcgtgcacaccttcccggctgtcctacagtcctcaggactctactccctcagcagcgtggtgaccgtgccctccagcagcttgggcacccagacctacatctgcaacgtgaatcacaagcccagcaacaccaaggtggacaagaaagttgagcccaaatcttgtgacaaaactcacacatgcccaccgtgcccagcacctgaactcctggggggaccgtcagtcttcctcttccccccaaaacccaaggacaccctcatgatctcccggacccctgaggtcacatgcgtggtggtggacgtgagccacgaagaccctgaggtcaagttcaactggtacgtggacggcgtggaggtgcataatgccaagacaaagccgtgtgaggagcagtacggcagcacgtaccgttgtgtcagcgtcctcaccgtcctgcaccaggactggctgaatggcaaggagtacaagtgcaaggtctccaacaaagccctcccagcccccatcgagaaaaccatctccaaagccaaagggcagccccgagaaccacaggtgtacaccctgcccccatcccgggaggagatgaccaagaaccaggtcagcctgacctgcctggtcaaaggcttctatcccagcgacatcgccgtggagtgggagagcaatgggcagccggagaacaactacaagaccacgcctcccgtgctggactccgacggctccttcttcctctatagcaagctcaccgtggacaagagcaggtggcagcaggggaacgtcttctcatgctccgtgatgcatgaggctctgcacaaccactacacgcagaagagcctctccctgtctccgggtaaa

SEQ ID NO: 2151 - DNA, 1359 bp, Artificial Sequence; identical to SEQ ID NO: 2147
  source: /note="Description of Artificial Sequence: Synthetic polynucleotide"

SEQ ID NO: 2152 - DNA, 1359 bp, Artificial Sequence
  source: /note="Description of Artificial Sequence: Synthetic polynucleotide"
caggtgccgctggtgcagtctggggctgaggtgaagaagcctggggcctcagtgaaggtctcctgcaaggcttctggatacaccttcaccggctactatatacactgggtgcgtcaggcccctggacaagggcttgagtggatggggtggataagccctaaccaaggtgaaacaaactatgcacagaagtttcaggacagggtcaccatgaccagggacacgtccatcagcacagcctatatggagctgagcaggctgagatctgacgacacggccgtgtattactgtgcgagagaggccacgatttttggaatgcttattgtaccatttgactactggggccagggaaccctggtcaccgtctcctcagcctccaccaagggcccatcggtcttccccctggcaccctcctccaagagcacctctgggggcacagcggccctgggctgcctggtcaaggactacttccccgaaccggtgacggtgtcgtggaactcaggcgccctgaccagcggcgtgcacaccttcccggctgtcctacagtcctcaggactctactccctcagcagcgtggtgaccgtgccctccagcagcttgggcacccagacctacatctgcaacgtgaatcacaagcccagcaacaccaaggtggacaagaaagttgagcccaaatcttgtgacaaaactcacacatgcccaccgtgcccagcacctgaactcctggggggaccgtcagtcttcctcttccccccaaaacccaaggacaccctcatgatctcccggacccctgaggtcacatgcgtggtggtggacgtgagccacgaagaccctgaggtcaagttcaactggtacgtggacggcgtggaggtgcataatgccaagacaaagccgtgtgaggagcagtacggcagcacgtaccgttgtgtcagcgtcctcaccgtcctgcaccaggactggctgaatggcaaggagtacaagtgcaaggtctccaacaaagccctcccagcccccatcgagaaaaccatctccaaagccaaagggcagccccgagaaccacaggtgtacaccctgcccccatcccgggaggagatgaccaagaaccaggtcagcctgacctgcctggtcaaaggcttctatcccagcgacatcgccgtggagtgggagagcaatgggcagccggagaacaactacaagaccacgcctcccgtgctggactccgacggctccttcttcctctatagcaagctcaccgtggacaagagcaggtggcagcaggggaacgtcttctcatgctccgtgatgcatgaggctctgcacaaccactacacgcagaagagcctctccctgtctccgggtaaa

SEQ ID NO: 2153 - DNA, 1359 bp, Artificial Sequence
  source: /note="Description of Artificial Sequence: Synthetic polynucleotide"
caggtgccgctggtgcagtctggggctgaggtgaagaagcctggggcctcagtgaaggtctcctgcaaggcttctggatacaccttcaccggctactatatacactgggtgcgtcaggcccctggacaagggcttgagtggatggggtggataagccctaaccaaggtgacacaaactatgcacagaagtttcaggacagggtcaccatgaccagggacacgtccatcagcacagcctatatggagctgagcaggctgagatctgacgacacggccgtgtattactgtgcgagagaggccacgatttttggaatgcttattgtaccatttgactactggggccagggaaccctggtcaccgtctcctcagcctccaccaagggcccatcggtcttccccctggcaccctcctccaagagcacctctgggggcacagcggccctgggctgcctggtcaaggactacttccccgaaccggtgacggtgtcgtggaactcaggcgccctgaccagcggcgtgcacaccttcccggctgtcctacagtcctcaggactctactccctcagcagcgtggtgaccgtgccctccagcagcttgggcacccagacctacatctgcaacgtgaatcacaagcccagcaacaccaaggtggacaagaaagttgagcccaaatcttgtgacaaaactcacacatgcccaccgtgcccagcacctgaactcctggggggaccgtcagtcttcctcttccccccaaaacccaaggacaccctcatgatctcccggacccctgaggtcacatgcgtggtggtggacgtgagccacgaagaccctgaggtcaagttcaactggtacgtggacggcgtggaggtgcataatgccaagacaaagccgtgtgaggagcagtacggcagcacgtaccgttgtgtcagcgtcctcaccgtcctgcaccaggactggctgaatggcaaggagtacaagtgcaaggtctccaacaaagccctcccagcccccatcgagaaaaccatctccaaagccaaagggcagccccgagaaccacaggtgtacaccctgcccccatcccgggaggagatgaccaagaaccaggtcagcctgacctgcctggtcaaaggcttctatcccagcgacatcgccgtggagtgggagagcaatgggcagccggagaacaactacaagaccacgcctcccgtgctggactccgacggctccttcttcctctatagcaagctcaccgtggacaagagcaggtggcagcaggggaacgtcttctcatgctccgtgatgcatgaggctctgcacaaccactacacgcagaagagcctctccctgtctccgggtaaa

SEQ ID NO: 2154 - DNA, 1359 bp, Artificial Sequence
  source: /note="Description of Artificial Sequence: Synthetic polynucleotide"
caggtgccgctggtgcagtctggggctgaggtgaagaagcctggggcctcagtgaaggtctcctgcaaggcttctggatacaccttcaccggctactatatacactgggtgcgtcaggcccctggacaagggcttgagtggatggggtggataagccctaaccaaggtgaaacaaactatgcacagaagtttcaggacagggtcaccatgaccagggacacgtccatcagcacagcctatatggagctgagcaggctgagatctgacgacacggccgtgtattactgtacgagagaggccacgatttttggaatgcttattgtaccatttgactactggggccagggaaccctggtcaccgtctcctcagcctccaccaagggcccatcggtcttccccctggcaccctcctccaagagcacctctgggggcacagcggccctgggctgcctggtcaaggactacttccccgaaccggtgacggtgtcgtggaactcaggcgccctgaccagcggcgtgcacaccttcccggctgtcctacagtcctcaggactctactccctcagcagcgtggtgaccgtgccctccagcagcttgggcacccagacctacatctgcaacgtgaatcacaagcccagcaacaccaaggtggacaagaaagttgagcccaaatcttgtgacaaaactcacacatgcccaccgtgcccagcacctgaactcctggggggaccgtcagtcttcctcttccccccaaaacccaaggacaccctcatgatctcccggacccctgaggtcacatgcgtggtggtggacgtgagccacgaagaccctgaggtcaagttcaactggtacgtggacggcgtggaggtgcataatgccaagacaaagccgtgtgaggagcagtacggcagcacgtaccgttgtgtcagcgtcctcaccgtcctgcaccaggactggctgaatggcaaggagtacaagtgcaaggtctccaacaaagccctcccagcccccatcgagaaaaccatctccaaagccaaagggcagccccgagaaccacaggtgtacaccctgcccccatcccgggaggagatgaccaagaaccaggtcagcctgacctgcctggtcaaaggcttctatcccagcgacatcgccgtggagtgggagagcaatgggcagccggagaacaactacaagaccacgcctcccgtgctggactccgacggctccttcttcctctatagcaagctcaccgtggacaagagcaggtggcagcaggggaacgtcttctcatgctccgtgatgcatgaggctctgcacaaccactacacgcagaagagcctctccctgtctccgggtaaa

SEQ ID NO: 2155 - DNA, 1359 bp, Artificial Sequence
  source: /note="Description of Artificial Sequence: Synthetic polynucleotide"
caggtgccgctggtgcagtctggggctgaggtgaagaagcctggggcctcagtgaaggtctcctgcaaggcttctggatacaccttcaccggctactatatacactgggtgcgtcaggcccctggacaagggcttgagtggatggggtggataagccctaacaatggtgaaacaaactatgcacagaagtttcaggacagggtcaccatgaccagggacacgtccatcagcacagcctatatggagctgagcaggctgagatctgacgacacggccgtgtattactgtgcgagagaggccacgatttttggaatgcttattgtaccatttgactactggggccagggaaccctggtcaccgtctcctcagcctccaccaagggcccatcggtcttccccctggcaccctcctccaagagcacctctgggggcacagcggccctgggctgcctggtcaaggactacttccccgaaccggtgacggtgtcgtggaactcaggcgccctgaccagcggcgtgcacaccttcccggctgtcctacagtcctcaggactctactccctcagcagcgtggtgaccgtgccctccagcagcttgggcacccagacctacatctgcaacgtgaatcacaagcccagcaacaccaaggtggacaagaaagttgagcccaaatcttgtgacaaaactcacacatgcccaccgtgcccagcacctgaactcctggggggaccgtcagtcttcctcttccccccaaaacccaaggacaccctcatgatctcccggacccctgaggtcacatgcgtggtggtggacgtgagccacgaagaccctgaggtcaagttcaactggtacgtggacggcgtggaggtgcataatgccaagacaaagccgtgtgaggagcagtacggcagcacgtaccgttgtgtcagcgtcctcaccgtcctgcaccaggactggctgaatggcaaggagtacaagtgcaaggtctccaacaaagccctcccagcccccatcgagaaaaccatctccaaagccaaagggcagccccgagaaccacaggtgtacaccctgcccccatcccgggaggagatgaccaagaaccaggtcagcctgacctgcctggtcaaaggcttctatcccagcgacatcgccgtggagtgggagagcaatgggcagccggagaacaactacaagaccacgcctcccgtgctggactccgacggctccttcttcctctatagcaagctcaccgtggacaagagcaggtggcagcaggggaacgtcttctcatgctccgtgatgcatgaggctctgcacaaccactacacgcagaagagcctctccctgtctccgggtaaa

SEQ ID NO: 2156 - DNA, 1359 bp, Artificial Sequence
  source: /note="Description of Artificial Sequence: Synthetic polynucleotide"
caggtgccgctggtgcagtctggggctgaggtgaagaagcctggggcctcagtgaaggtctcctgcaaggcttctggatacaccttcaccggctactatatacactgggtgcgtcaggcccctggacaagggcttgagtggatggggtggataagccctaacaatggtgacacaaactatgcacagaagtttcaggacagggtcaccatgaccagggacacgtccatcagcacagcctatatggagctgagcaggctgagatctgacgacacggccgtgtattactgtgcgagagaggccacgatttttggaatgcttattgtaccatttgactactggggccagggaaccctggtcaccgtctcctcagcctccaccaagggcccatcggtcttccccctggcaccctcctccaagagcacctctgggggcacagcggccctgggctgcctggtcaaggactacttccccgaaccggtgacggtgtcgtggaactcaggcgccctgaccagcggcgtgcacaccttcccggctgtcctacagtcctcaggactctactccctcagcagcgtggtgaccgtgccctccagcagcttgggcacccagacctacatctgcaacgtgaatcacaagcccagcaacaccaaggtggacaagaaagttgagcccaaatcttgtgacaaaactcacacatgcccaccgtgcccagcacctgaactcctggggggaccgtcagtcttcctcttccccccaaaacccaaggacaccctcatgatctcccggacccctgaggtcacatgcgtggtggtggacgtgagccacgaagaccctgaggtcaagttcaactggtacgtggacggcgtggaggtgcataatgccaagacaaagccgtgtgaggagcagtacggcagcacgtaccgttgtgtcagcgtcctcaccgtcctgcaccaggactggctgaatggcaaggagtacaagtgcaaggtctccaacaaagccctcccagcccccatcgagaaaaccatctccaaagccaaagggcagccccgagaaccacaggtgtacaccctgcccccatcccgggaggagatgaccaagaaccaggtcagcctgacctgcctggtcaaaggcttctatcccagcgacatcgccgtggagtgggagagcaatgggcagccggagaacaactacaagaccacgcctcccgtgctggactccgacggctccttcttcctctatagcaagctcaccgtggacaagagcaggtggcagcaggggaacgtcttctcatgctccgtgatgcatgaggctctgcacaaccactacacgcagaagagcctctccctgtctccgggtaaa

SEQ ID NO: 2157 - DNA, 1359 bp, Artificial Sequence
  source: /note="Description of Artificial Sequence: Synthetic polynucleotide"
caggtgccgctggtgcagtctggggctgaggtgaagaagcctggggcctcagtgaaggtctcctgcaaggcttctggatacaccttcaccggctactatatacactgggtgcgtcaggcccctggacaagggcttgagtggatggggtggataagccctaaccaaggtgacacaaactatgcacagaagtttcaggacagggtcaccatgaccagggacacgtccatcagcacagcctatatggagctgagcaggctgagatctgacgacacggccgtgtattactgtacgagagaggccacgatttttggaatgcttattgtaccatttgactactggggccagggaaccctggtcaccgtctcctcagcctccaccaagggcccatcggtcttccccctggcaccctcctccaagagcacctctgggggcacagcggccctgggctgcctggtcaaggactacttccccgaaccggtgacggtgtcgtggaactcaggcgccctgaccagcggcgtgcacaccttcccggctgtcctacagtcctcaggactctactccctcagcagcgtggtgaccgtgccctccagcagcttgggcacccagacctacatctgcaacgtgaatcacaagcccagcaacaccaaggtggacaagaaagttgagcccaaatcttgtgacaaaactcacacatgcccaccgtgcccagcacctgaactcctggggggaccgtcagtcttcctcttccccccaaaacccaaggacaccctcatgatctcccggacccctgaggtcacatgcgtggtggtggacgtgagccacgaagaccctgaggtcaagttcaactggtacgtggacggcgtggaggtgcataatgccaagacaaagccgtgtgaggagcagtacggcagcacgtaccgttgtgtcagcgtcctcaccgtcctgcaccaggactggctgaatggcaaggagtacaagtgcaaggtctccaacaaagccctcccagcccccatcgagaaaaccatctccaaagccaaagggcagccccgagaaccacaggtgtacaccctgcccccatcccgggaggagatgaccaagaaccaggtcagcctgacctgcctggtcaaaggcttctatcccagcgacatcgccgtggagtgggagagcaatgggcagccggagaacaactacaagaccacgcctcccgtgctggactccgacggctccttcttcctctatagcaagctcaccgtggacaagagcaggtggcagcaggggaacgtcttctcatgctccgtgatgcatgaggctctgcacaaccactacacgcagaagagcctctccctgtctccgggtaaa

SEQ ID NO: 2158 - DNA, 1359 bp, Artificial Sequence
  source: /note="Description of Artificial Sequence: Synthetic polynucleotide"
caggtgccgctggtgcagtctggggctgaggtgaagaagcctggggcctcagtgaaggtctcctgcaaggcttctggatacaccttcaccggctactatatacactgggtgcgtcaggcccctggacaagggcttgagtggatggggtggataagccctaacaatggtgaaacaaactatgcacagaagtttcaggacagggtcaccatgaccagggacacgtccatcagcacagcctatatggagctgagcaggctgagatctgacgacacggccgtgtattactgtacgagagaggccacgatttttggaatgcttattgtaccatttgactactggggccagggaaccctggtcaccgtctcctcagcctccaccaagggcccatcggtcttccccctggcaccctcctccaagagcacctctgggggcacagcggccctgggctgcctggtcaaggactacttccccgaaccggtgacggtgtcgtggaactcaggcgccctgaccagcggcgtgcacaccttcccggctgtcctacagtcctcaggactctactccctcagcagcgtggtgaccgtgccctccagcagcttgggcacccagacctacatctgcaacgtgaatcacaagcccagcaacaccaaggtggacaagaaagttgagcccaaatcttgtgacaaaactcacacatgcccaccgtgcccagcacctgaactcctggggggaccgtcagtcttcctcttccccccaaaacccaaggacaccctcatgatctcccggacccctgaggtcacatgcgtggtggtggacgtgagccacgaagaccctgaggtcaagttcaactggtacgtggacggcgtggaggtgcataatgccaagacaaagccgtgtgaggagcagtacggcagcacgtaccgttgtgtcagcgtcctcaccgtcctgcaccaggactggctgaatggcaaggagtacaagtgcaaggtctccaacaaagccctcccagcccccatcgagaaaaccatctccaaagccaaagggcagccccgagaaccacaggtgtacaccctgcccccatcccgggaggagatgaccaagaaccaggtcagcctgacctgcctggtcaaaggcttctatcccagcgacatcgccgtggagtgggagagcaatgggcagccggagaacaactacaagaccacgcctcccgtgctggactccgacggctccttcttcctctatagcaagctcaccgtggacaagagcaggtggcagcaggggaacgtcttctcatgctccgtgatgcatgaggctctgcacaaccactacacgcagaagagcctctccctgtctccgggtaaa

SEQ ID NO: 2159 - DNA, 1359 bp, Artificial Sequence; identical to SEQ ID NO: 2152
  source: /note="Description of Artificial Sequence: Synthetic polynucleotide"

SEQ ID NO: 2160 - DNA, 1359 bp, Artificial Sequence; identical to SEQ ID NO: 2156
  source: /note="Description of Artificial Sequence: Synthetic polynucleotide"

SEQ ID NO: 2161 - DNA, 1359 bp, Artificial Sequence; identical to SEQ ID NO: 2153
  source: /note="Description of Artificial Sequence: Synthetic polynucleotide"

SEQ ID NO: 2162 - DNA, 1359 bp, Artificial Sequence; identical to SEQ ID NO: 2155
  source: /note="Description of Artificial Sequence: Synthetic polynucleotide"

SEQ ID NO: 2163 - DNA, 1359 bp, Artificial Sequence
  source: /note="Description of Artificial Sequence: Synthetic polynucleotide"
caggtgcagctggtgcagtctggggctgaggtgaagaagcctggggcctcagtgaaggtctcctgcaaggcttctggatacaccttcaccggctactatatacactgggtgcgtcaggcccctggacaagggcttgagtggatggggtggataagccctaaccaaggtgaaacaaactatgcacagaagtttcaggacagggtcaccatgaccagggacacgtccatcagcacagcctatatggagctgagcagcctgagatctgacgacacggccgtgtattactgtgcgagagaggccacgatttttggaatgcttattgtaccatttgactactggggccagggaaccctggtcaccgtctcctcagcctccaccaagggcccatcggtcttccccctggcaccctcctccaagagcacctctgggggcacagcggccctgggctgcctggtcaaggactacttccccgaaccggtgacggtgtcgtggaactcaggcgccctgaccagcggcgtgcacaccttcccggctgtcctacagtcctcaggactctactccctcagcagcgtggtgaccgtgccctccagcagcttgggcacccagacctacatctgcaacgtgaatcacaagcccagcaacaccaaggtggacaagaaagttgagcccaaatcttgtgacaaaactcacacatgcccaccgtgcccagcacctgaactcctggggggaccgtcagtcttcctcttccccccaaaacccaaggacaccctcatgatctcccggacccctgaggtcacatgcgtggtggtggacgtgagccacgaagaccctgaggtcaagttcaactggtacgtggacggcgtggaggtgcataatgccaagacaaagccgtgtgaggagcagtacggcagcacgtaccgttgtgtcagcgtcctcaccgtcctgcaccaggactggctgaatggcaaggagtacaagtgcaaggtctccaacaaagccctcccagcccccatcgagaaaaccatctccaaagccaaagggcagccccgagaaccacaggtgtacaccctgcccccatcccgggaggagatgaccaagaaccaggtcagcctgacctgcctggtcaaaggcttctatcccagcgacatcgccgtggagtgggagagcaatgggcagccggagaacaactacaagaccacgcctcccgtgctggactccgacggctccttcttcctctatagcaagctcaccgtggacaagagcaggtggcagcaggggaacgtcttctcatgctccgtgatgcatgaggctctgcacaaccactacacgcagaagagcctctccctgtctccgggtaaa

SEQ ID NO: 2164 - DNA, 1359 bp, Artificial Sequence; identical to SEQ ID NO: 2163
  source: /note="Description of Artificial Sequence: Synthetic polynucleotide"

SEQ ID NO: 2165 - DNA, 1374 bp, Artificial Sequence; identical to SEQ ID NO: 2042
  source: /note="Description of Artificial Sequence: Synthetic polynucleotide"

SEQ ID NO: 2166 - DNA, 1374 bp, Artificial Sequence; identical to SEQ ID NO: 2042
  source: /note="Description of Artificial Sequence: Synthetic polynucleotide"

SEQ ID NO: 2167 - DNA, 1374 bp, Artificial Sequence; identical to SEQ ID NO: 2042
  source: /note="Description of Artificial Sequence: Synthetic polynucleotide"

SEQ ID NO: 2168 - DNA, 1374 bp, Artificial Sequence; identical to SEQ ID NO: 2042
  source: /note="Description of Artificial Sequence: Synthetic polynucleotide"

SEQ ID NO: 2169 - DNA, 1374 bp, Artificial Sequence; identical to SEQ ID NO: 2042
  source: /note="Description of Artificial Sequence: Synthetic polynucleotide"

SEQ ID NO: 2170 - DNA, 1374 bp, Artificial Sequence; identical to SEQ ID NO: 2042
  source: /note="Description of Artificial Sequence: Synthetic polynucleotide"

SEQ ID NO: 2171 - DNA, 1374 bp, Artificial Sequence; identical to SEQ ID NO: 2042
  source: /note="Description of Artificial Sequence: Synthetic polynucleotide"

SEQ ID NO: 2172 - DNA, 1374 bp, Artificial Sequence; identical to SEQ ID NO: 2042
  source: /note="Description of Artificial Sequence: Synthetic polynucleotide"

SEQ ID NO: 2173 - DNA, 1374 bp, Artificial Sequence; identical to SEQ ID NO: 2042
  source: /note="Description of Artificial Sequence: Synthetic polynucleotide"

SEQ ID NO: 2174 - DNA, 1374 bp, Artificial Sequence; identical to SEQ ID NO: 2042
  source: /note="Description of Artificial Sequence: Synthetic polynucleotide"

SEQ ID NO: 2175 - DNA, 1374 bp, Artificial Sequence; identical to SEQ ID NO: 2042
  source: /note="Description of Artificial Sequence: Synthetic polynucleotide"

SEQ ID NO: 2176 - DNA, 1374 bp, Artificial Sequence; identical to SEQ ID NO: 2042
  source: /note="Description of Artificial Sequence: Synthetic polynucleotide"

SEQ ID NO: 2177 - DNA, 1374 bp, Artificial Sequence
  source: /note="Description of Artificial Sequence: Synthetic polynucleotide"
cagatgcaggtggtgcagtctggggctgaggtgaagaagcctggggcctcagtgaaggtctcctgcaaggcttccggatacaccttcaccggctactatatgcattgggtgcgacaggcccctggacaagggcttgagtggatgggatggatcaaccctaacagtggtggcacaaactatgcacagaagtttcagggcagggtcaccatgaccagggacacgtccatcagtacagcctacatggagctgagcagcctgaggtctgacgacacggccgtgtattactgtgcgagagggggggattacgttttcgggacttatcggcctcactactactacggtatggacgtctggggccaagggaccacggtcaccgtctcctcagcctccaccaagggcccatcggtcttccccctggcaccctcctccaagagcacctctgggggcacagcggccctgggctgcctggtcaaggactacttccccgaaccggtgacggtgtcgtggaactcaggcgccctgaccagcggcgtgcacaccttcccggctgtcctacagtcctcaggactctactccctcagcagcgtggtgaccgtgccctccagcagcttgggcacccagacctacatctgcaacgtgaatcacaagcccagcaacaccaaggtggacaagaaagttgagcccaaatcttgtgacaaaactcacacatgcccaccgtgcccagcacctgaactcctggggggaccgtcagtcttcctcttccccccaaaacccaaggacaccctcatgatctcccggacccctgaggtcacatgcgtggtggtggacgtgagccacgaagaccctgaggtcaagttcaactggtacgtggacggcgtggaggtgcataatgccaagacaaagccgtgtgaggagcagtacggcagcacgtaccgttgtgtcagcgtcctcaccgtcctgcaccaggactggctgaatggcaaggagtacaagtgcaaggtctccaacaaagccctcccagcccccatcgagaaaaccatctccaaagccaaagggcagccccgagaaccacaggtgtacaccctgcccccatcccgggaggagatgaccaagaaccaggtcagcctgacctgcctggtcaaaggcttctatcccagcgacatcgccgtggagtgggagagcaatgggcagccggagaacaactacaagaccacgcctcccgtgctggactccgacggctccttcttcctctatagcaagctcaccgtggacaagagcaggtggcagcaggggaacgtcttctcatgctccgtgatgcatgaggctctgcacaaccactacacgcagaagagcctctccctgtctccgggtaaa

SEQ ID NO: 2178 - DNA, 1374 bp, Artificial Sequence
  source: /note="Description of Artificial Sequence: Synthetic polynucleotide"
cagatgcaggtggtgcagtctggggctgaggtgaagaagcctggggcctcagtgaaggtctcctgcaaggcttccggatacaccttcaccggctactatatgcattgggtgcgacaggcccctggacaagggcttgagtggatgggatggatcaaccctaacagtggtggcacaaactatgcacagaagtttcagggcagggtcaccatgaccagggacacgtccatcagtacagcctacatggagctgagcaggctgaggtctgacgacacggccgtgtattactgtgcgagagggggggattacgttttcgggacttatcggcctcactactactacggtatggacgtctggggccaagggaccacggtcaccgtctcctcagcctccaccaagggcccatcggtcttccccctggcaccctcctccaagagcacctctgggggcacagcggccctgggctgcctggtcaaggactacttccccgaaccggtgacggtgtcgtggaactcaggcgccctgaccagcggcgtgcacaccttcccggctgtcctacagtcctcaggactctactccctcagcagcgtggtgaccgtgccctccagcagcttgggcacccagacctacatctgcaacgtgaatcacaagcccagcaacaccaaggtggacaagaaagttgagcccaaatcttgtgacaaaactcacacatgcccaccgtgcccagcacctgaactcctggggggaccgtcagtcttcctcttccccccaaaacccaaggacaccctcatgatctcccggacccctgaggtcacatgcgtggtggtggacgtgagccacgaagaccctgaggtcaagttcaactggtacgtggacggcgtggaggtgcataatgccaagacaaagccgtgtgaggagcagtacggcagcacgtaccgttgtgtcagcgtcctcaccgtcctgcaccaggactggctgaatggcaaggagtacaagtgcaaggtctccaacaaagccctcccagcccccatcgagaaaaccatctccaaagccaaagggcagccccgagaaccacaggtgtacaccctgcccccatcccgggaggagatgaccaagaaccaggtcagcctgacctgcctggtcaaaggcttctatcccagcgacatcgccgtggagtgggagagcaatgggcagccggagaacaactacaagaccacgcctcccgtgctggactccgacggctccttcttcctctatagcaagctcaccgtggacaagagcaggtggcagcaggggaacgtcttctcatgctccgtgatgcatgaggctctgcacaaccactacacgcagaagagcctctccctgtctccgggtaaa

SEQ ID NO: 2179 - DNA, 1353 bp, Artificial Sequence; identical to SEQ ID NO: 2079
  source: /note="Description of Artificial Sequence: Synthetic polynucleotide"

SEQ ID NO: 2180 - DNA, 1353 bp, Artificial Sequence; identical to SEQ ID NO: 2061
  source: /note="Description of Artificial Sequence: Synthetic polynucleotide"

SEQ ID NO: 2181 - DNA, 1374 bp, Artificial Sequence; identical to SEQ ID NO: 2042
  source: /note="Description of Artificial Sequence: Synthetic polynucleotide"

SEQ ID NO: 2182 - DNA, 1353 bp, Artificial Sequence
  source: /note="Description of Artificial Sequence: Synthetic polynucleotide"
caggtgcagttggtggagtctgggggaggcgtggtccagcctgggaggtccctgagactctcctgtacagcgtctggattcaccttcagtagctatggcatacactgggtccgccaggctccaggcaaggggctggagtgggtggcagttatatggtatgatggaagtaataagttccatgcagactccgtgaagggccgattcaccatctccagagacaattccaagaacacgctgtatctgcaaatgaacagcctgagagccgaggactcggctatgtacttctgtgcgagaggaaaagtggctggtatgcctgaagcttttgaaatctggggccaagggacaaaggtcaccgtctcttcagcctccaccaagggcccatcggtcttccccctggcaccctcctccaagagcacctctgggggcacagcggccctgggctgcctggtcaaggactacttccccgaaccggtgacggtgtcgtggaactcaggcgccctgaccagcggcgtgcacaccttcccggctgtcctacagtcctcaggactctactccctcagcagcgtggtgaccgtgccctccagcagcttgggcacccagacctacatctgcaacgtgaatcacaagcccagcaacaccaaggtggacaagaaagttgagcccaaatcttgtgacaaaactcacacatgcccaccgtgcccagcacctgaactcctggggggaccgtcagtcttcctcttccccccaaaacccaaggacaccctcatgatctcccggacccctgaggtcacatgcgtggtggtggacgtgagccacgaagaccctgaggtcaagttcaactggtacgtggacggcgtggaggtgcataatgccaagacaaagccgtgtgaggagcagtacggcagcacgtaccgttgtgtcagcgtcctcaccgtcctgcaccaggactggctgaatggcaaggagtacaagtgcaaggtctccaacaaagccctcccagcccccatcgagaaaaccatctccaaagccaaagggcagccccgagaaccacaggtgtacaccctgcccccatcccgggaggagatgaccaagaaccaggtcagcctgacctgcctggtcaaaggcttctatcccagcgacatcgccgtggagtgggagagcaatgggcagccggagaacaactacaagaccacgcctcccgtgctggactccgacggctccttcttcctctatagcaagctcaccgtggacaagagcaggtggcagcaggggaacgtcttctcatgctccgtgatgcatgaggctctgcacaaccactacacgcagaagagcctctccctgtctccgggtaaa

SEQ ID NO: 2183 - DNA, 1377 bp, Artificial Sequence
  source: /note="Description of Artificial Sequence: Synthetic polynucleotide"
caaatgcagctggtgcagtctggggctgaggtgaagaagcctggggcctcagtgaaggtctcctgcaaggcttctggatacaccttcaccagttatgatatcaactgggtgcgacaggccactggacaagggcttgagtggatgggatggatgaaccctaacagtggtaacacaggctatgcacagaagttccagggcagagtcaccatgaccagggacacctccataagcacagcctacatggagctgagcagcctgagatctcaggacacggccgtgtattactgtgcgagagggggtgattacgtttgggggagttatcgtccctactactactactacggtatggacgtctggggccaagggaccacggtcaccgtctcctcagcctccaccaagggcccatcggtcttccccctggcaccctcctccaagagcacctctgggggcacagcggccctgggctgcctggtcaaggactacttccccgaaccggtgacggtgtcgtggaactcaggcgccctgaccagcggcgtgcacaccttcccggctgtcctacagtcctcaggactctactccctcagcagcgtggtgaccgtgccctccagcagcttgggcacccagacctacatctgcaacgtgaatcacaagcccagcaacaccaaggtggacaagaaagttgagcccaaatcttgtgacaaaactcacacatgcccaccgtgcccagcacctgaactcctggggggaccgtcagtcttcctcttccccccaaaacccaaggacaccctcatgatctcccggacccctgaggtcacatgcgtggtggtggacgtgagccacgaagaccctgaggtcaagttcaactggtacgtggacggcgtggaggtgcataatgccaagacaaagccgtgtgaggagcagtacggcagcacgtaccgttgtgtcagcgtcctcaccgtcctgcaccaggactggctgaatggcaaggagtacaagtgcaaggtctccaacaaagccctcccagcccccatcgagaaaaccatctccaaagccaaagggcagccccgagaaccacaggtgtacaccctgcccccatcccgggaggagatgaccaagaaccaggtcagcctgacctgcctggtcaaaggcttctatcccagcgacatcgccgtggagtgggagagcaatgggcagccggagaacaactacaagaccacgcctcccgtgctggactccgacggctccttcttcctctatagcaagctcaccgtggacaagagcaggtggcagcaggggaacgtcttctcatgctccgtgatgcatgaggctctgcacaaccactacacgcagaagagcctctccctgtctccgggtaaa

SEQ ID NO: 2184 - DNA, 1353 bp, Artificial Sequence
  source: /note="Description of Artificial Sequence: Synthetic polynucleotide"
caggtgcagttggtggagtctgggggaggcgtggtccagcctgggaggtccctgagactctcctgtgcagcgtctggattcaccttcagtagctatggcatacactgggtccgccaggctccaggcaaggggctggagtgggtggcagttatatggtatgatgcaagtaataagttccatgcagacgccgtgaagggccgattcaccatctccagagacaattccaagaacacgctgtatctgcaaatgaacagcctgagagccgaggactcggctatgtacttctgtgcgagaggaaaagtggctggtatgcctgaagcttttgaaatctggggccaagggacaaaggtcaccgtctcttcagcctccaccaagggcccatcggtcttccccctggcaccctcctccaagagcacctctgggggcacagcggccctgggctgcctggtcaaggactacttccccgaaccggtgacggtgtcgtggaactcaggcgccctgaccagcggcgtgcacaccttcccggctgtcctacagtcctcaggactctactccctcagcagcgtggtgaccgtgccctccagcagcttgggcacccagacctacatctgcaacgtgaatcacaagcccagcaacaccaaggtggacaagaaagttgagcccaaatcttgtgacaaaactcacacatgcccaccgtgcccagcacctgaactcctggggggaccgtcagtcttcctcttccccccaaaacccaaggacaccctcatgatctcccggacccctgaggtcacatgcgtggtggtggacgtgagccacgaagaccctgaggtcaagttcaactggtacgtggacggcgtggaggtgcataatgccaagacaaagccgtgtgaggagcagtacggcagcacgtaccgttgtgtcagcgtcctcaccgtcctgcaccaggactggctgaatggcaaggagtacaagtgcaaggtctccaacaaagccctcccagcccccatcgagaaaaccatctccaaagccaaagggcagccccgagaaccacaggtgtacaccctgcccccatcccgggaggagatgaccaagaaccaggtcagcctgacctgcctggtcaaaggcttctatcccagcgacatcgccgtggagtgggagagcaatgggcagccggagaacaactacaagaccacgcctcccgtgctggactccgacggctccttcttcctctatagcaagctcaccgtggacaagagcaggtggcagcaggggaacgtcttctcatgctccgtgatgcatgaggctctgcacaaccactacacgcagaagagcctctccctgtctccgggtaaa

SEQ ID NO: 2185 - DNA, 1353 bp, Artificial Sequence
  source: /note="Description of Artificial Sequence: Synthetic polynucleotide"
caggtgcagttggtggagtctgggggaggcgtggtccagcctgggaggtccctgagactctcctgtacagcgtctggattcaccttcagtagctatggcatacactgggtccgccaggctccaggcaaggggctggagtgggtggcagttatatggtatgatgcaagtaataagttccatgcagacgccgtgaagggccgattcaccatctccagagacaattccaagaacacgctgtatctgcaaatgaacagcctgagagccgaggactcggctatgtacttctgtgcgagaggaaaagtggctggtatgcctgaagcttttgaaatctggggccaagggacaaaggtcaccgtctcttcagcctccaccaagggcccatcggtcttccccctggcaccctcctccaagagcacctctgggggcacagcggccctgggctgcctggtcaaggactacttccccgaaccggtgacggtgtcgtggaactcaggcgccctgaccagcggcgtgcacaccttcccggctgtcctacagtcctcaggactctactccctcagcagcgtggtgaccgtgccctccagcagcttgggcacccagacctacatctgcaacgtgaatcacaagcccagcaacaccaaggtggacaagaaagttgagcccaaatcttgtgacaaaactcacacatgcccaccgtgcccagcacctgaactcctggggggaccgtcagtcttcctcttccccccaaaacccaaggacaccctcatgatctcccggacccctgaggtcacatgcgtggtggtggacgtgagccacgaagaccctgaggtcaagttcaactggtacgtggacggcgtggaggtgcataatgccaagacaaagccgtgtgaggagcagtacggcagcacgtaccgttgtgtcagcgtcctcaccgtcctgcaccaggactggctgaatggcaaggagtacaagtgcaaggtctccaacaaagccctcccagcccccatcgagaaaaccatctccaaagccaaagggcagccccgagaaccacaggtgtacaccctgcccccatcccgggaggagatgaccaagaaccaggtcagcctgacctgcctggtcaaaggcttctatcccagcgacatcgccgtggagtgggagagcaatgggcagccggagaacaactacaagaccacgcctcccgtgctggactccgacggctccttcttcctctatagcaagctcaccgtggacaagagcaggtggcagcaggggaacgtcttctcatgctccgtgatgcatgaggctctgcacaaccactacacgcagaagagcctctccctgtctccgggtaaa

SEQ ID NO: 2186 - DNA, 1353 bp, Artificial Sequence; identical to SEQ ID NO: 2184
  source: /note="Description of Artificial Sequence: Synthetic polynucleotide"

SEQ ID NO: 2187 - DNA, 1353 bp, Artificial Sequence
  source: /note="Description of Artificial Sequence: Synthetic polynucleotide"
caggtgcagttggtggagtctgggggaggcgtggtccagcctgggaggtccctgagactctcctgtgcagcgtctggattcaccttcagtagctatggcatacactgggtccgccaggctccaggcaaggggctggagtgggtggcagttatatggtatgatgcaagtaataagttccatgcagacgccgtgaagggccgattcaccatctccagagacaattccaagaacacgctgtatctgcaaatgaacagcctgagagccgaggactcggctatgtacttctgtgcgagaggaaaagtggctggtatgcctgaagcttttgaaatctggggccaagggacattggtcaccgtctcttcagcctccaccaagggcccatcggtcttccccctggcaccctcctccaagagcacctctgggggcacagcggccctgggctgcctggtcaaggactacttccccgaaccggtgacggtgtcgtggaactcaggcgccctgaccagcggcgtgcacaccttcccggctgtcctacagtcctcaggactctactccctcagcagcgtggtgaccgtgccctccagcagcttgggcacccagacctacatctgcaacgtgaatcacaagcccagcaacaccaaggtggacaagaaagttgagcccaaatcttgtgacaaaactcacacatgcccaccgtgcccagcacctgaactcctggggggaccgtcagtcttcctcttccccccaaaacccaaggacaccctcatgatctcccggacccctgaggtcacatgcgtggtggtggacgtgagccacgaagaccctgaggtcaagttcaactggtacgtggacggcgtggaggtgcataatgccaagacaaagccgtgtgaggagcagtacggcagcacgtaccgttgtgtcagcgtcctcaccgtcctgcaccaggactggctgaatggcaaggagtacaagtgcaaggtctccaacaaagccctcccagcccccatcgagaaaaccatctccaaagccaaagggcagccccgagaaccacaggtgtacaccctgcccccatcccgggaggagatgaccaagaaccaggtcagcctgacctgcctggtcaaaggcttctatcccagcgacatcgccgtggagtgggagagcaatgggcagccggagaacaactacaagaccacgcctcccgtgctggactccgacggctccttcttcctctatagcaagctcaccgtggacaagagcaggtggcagcaggggaacgtcttctcatgctccgtgatgcatgaggctctgcacaaccactacacgcagaagagcctctccctgtctccgggtaaa

SEQ ID NO: 2188 - DNA, 1353 bp, Artificial Sequence
  source: /note="Description of Artificial Sequence: Synthetic polynucleotide"
caggtgcagttggtggagtctgggggaggcgtggtccagcctgggaggtccctgagactctcctgtgcagcgtctggattcaccttcagtagctatggcatacactgggtccgccaggctccaggcaaggggctggagtgggtggcagttatatggtatgatgcaagtaataagttccatgcagactccgtgaagggccgattcaccatctccagagacaattccaagaacacgctgtatctgcaaatgaacagcctgagagccgaggactcggctatgtacttctgtgcgagaggaaaagtggctggtatgcctgaagcttttgaaatctggggccaagggacaaaggtcaccgtctcttcagcctccaccaagggcccatcggtcttccccctggcaccctcctccaagagcacctctgggggcacagcggccctgggctgcctggtcaaggactacttccccgaaccggtgacggtgtcgtggaactcaggcgccctgaccagcggcgtgcacaccttcccggctgtcctacagtcctcaggactctactccctcagcagcgtggtgaccgtgccctccagcagcttgggcacccagacctacatctgcaacgtgaatcacaagcccagcaacaccaaggtggacaagaaagttgagcccaaatcttgtgacaaaactcacacatgcccaccgtgcccagcacctgaactcctggggggaccgtcagtcttcctcttccccccaaaacccaaggacaccctcatgatctcccggacccctgaggtcacatgcgtggtggtggacgtgagccacgaagaccctgaggtcaagttcaactggtacgtggacggcgtggaggtgcataatgccaagacaaagccgtgtgaggagcagtacggcagcacgtaccgttgtgtcagcgtcctcaccgtcctgcaccaggactggctgaatggcaaggagtacaagtgcaaggtctccaacaaagccctcccagcccccatcgagaaaaccatctccaaagccaaagggcagccccgagaaccacaggtgtacaccctgcccccatcccgggaggagatgaccaagaaccaggtcagcctgacctgcctggtcaaaggcttctatcccagcgacatcgccgtggagtgggagagcaatgggcagccggagaacaactacaagaccacgcctcccgtgctggactccgacggctccttcttcctctatagcaagctcaccgtggacaagagcaggtggcagcaggggaacgtcttctcatgctccgtgatgcatgaggctctgcacaaccactacacgcagaagagcctctccctgtctccgggtaaa

SEQ ID NO: 2189 - DNA, 1353 bp, Artificial Sequence
  source: /note="Description of Artificial Sequence: Synthetic polynucleotide"
caggtgcagttggtggagtctgggggaggcgtggtccagcctgggaggtccctgagactctcctgtgcagcgtctggattcaccttcagtagctatggcatacactgggtccgccaggctccaggcaaggggctggagtgggtggcagttatatggtatgatggaagtaataagttccatgcagacgccgtgaagggccgattcaccatctccagagacaattccaagaacacgctgtatctgcaaatgaacagcctgagagccgaggactcggctatgtacttctgtgcgagaggaaaagtggctggtatgcctgaagcttttgaaatctggggccaagggacaaaggtcaccgtctcttcagcctccaccaagggcccatcggtcttccccctggcaccctcctccaagagcacctctgggggcacagcggccctgggctgcctggtcaaggactacttccccgaaccggtgacggtgtcgtggaactcaggcgccctgaccagcggcgtgcacaccttcccggctgtcctacagtcctcaggactctactccctcagcagcgtggtgaccgtgccctccagcagcttgggcacccagacctacatctgcaacgtgaatcacaagcccagcaacaccaaggtggacaagaaagttgagcccaaatcttgtgacaaaactcacacatgcccaccgtgcccagcacctgaactcctggggggaccgtcagtcttcctcttccccccaaaacccaaggacaccctcatgatctcccggacccctgaggtcacatgcgtggtggtggacgtgagccacgaagaccctgaggtcaagttcaactggtacgtggacggcgtggaggtgcataatgccaagacaaagccgtgtgaggagcagtacggcagcacgtaccgttgtgtcagcgtcctcaccgtcctgcaccaggactggctgaatggcaaggagtacaagtgcaaggtctccaacaaagccctcccagcccccatcgagaaaaccatctccaaagccaaagggcagccccgagaaccacaggtgtacaccctgcccccatcccgggaggagatgaccaagaaccaggtcagcctgacctgcctggtcaaaggcttctatcccagcgacatcgccgtggagtgggagagcaatgggcagccggagaacaactacaagaccacgcctcccgtgctggactccgacggctccttcttcctctatagcaagctcaccgtggacaagagcaggtggcagcaggggaacgtcttctcatgctccgtgatgcatgaggctctgcacaaccactacacgcagaagagcctctccctgtctccgggtaaa

SEQ ID NO: 2190 - DNA, 1377 bp, Artificial Sequence
  source: /note="Description of Artificial Sequence: Synthetic polynucleotide"
caaatgcagctggtgcagtctggggctgaggtgaagaagcctggggcctcagtgaaggtctcctgcaaggcttctggatacaccttcaccagttatgatatcaactgggtgcgacaggccactggacaagggcttgagtggatgggatggatgaaccctaacagtggtggcacaggctatgcacagaagttccagggcagagtcaccatgaccagggacacctccataagcacagcctacatggagctgagcagcctgagatctcaggacacggccgtgtattactgtgcgagagggggtgattacgtttgggggagttatcgtccctactactactactacggtatggacgtctggggccaagggaccacggtcaccgtctcctcagcctccaccaagggcccatcggtcttccccctggcaccctcctccaagagcacctctgggggcacagcggccctgggctgcctggtcaaggactacttccccgaaccggtgacggtgtcgtggaactcaggcgccctgaccagcggcgtgcacaccttcccggctgtcctacagtcctcaggactctactccctcagcagcgtggtgaccgtgccctccagcagcttgggcacccagacctacatctgcaacgtgaatcacaagcccagcaacaccaaggtggacaagaaagttgagcccaaatcttgtgacaaaactcacacatgcccaccgtgcccagcacctgaactcctggggggaccgtcagtcttcctcttccccccaaaacccaaggacaccctcatgatctcccggacccctgaggtcacatgcgtggtggtggacgtgagccacgaagaccctgaggtcaagttcaactggtacgtggacggcgtggaggtgcataatgccaagacaaagccgtgtgaggagcagtacggcagcacgtaccgttgtgtcagcgtcctcaccgtcctgcaccaggactggctgaatggcaaggagtacaagtgcaaggtctccaacaaagccctcccagcccccatcgagaaaaccatctccaaagccaaagggcagccccgagaaccacaggtgtacaccctgcccccatcccgggaggagatgaccaagaaccaggtcagcctgacctgcctggtcaaaggcttctatcccagcgacatcgccgtggagtgggagagcaatgggcagccggagaacaactacaagaccacgcctcccgtgctggactccgacggctccttcttcctctatagcaagctcaccgtggacaagagcaggtggcagcaggggaacgtcttctcatgctccgtgatgcatgaggctctgcacaaccactacacgcagaagagcctctccctgtctccgggtaaa

SEQ ID NO: 2191 - DNA, 1377 bp, Artificial Sequence; identical to SEQ ID NO: 2183
  source: /note="Description of Artificial Sequence: Synthetic polynucleotide"

SEQ ID NO: 2192 - DNA, 1377 bp, Artificial Sequence; identical to SEQ ID NO: 2190
  source: /note="Description of Artificial Sequence: Synthetic polynucleotide"

SEQ ID NO: 2193 - DNA, 1377 bp, Artificial Sequence
  source: /note="Description of Artificial Sequence: Synthetic polynucleotide"
caaatgcagctggtgcagtctggggctgaggtgaagaagcctggggcctcagtgaaggtctcctgcaaggcttctggatacaccttcaccagttatgatatcaactgggtgcgacaggcccctggacaagggcttgagtggatgggatggatgaaccctaacagtggtggcacaggctatgcacagaagttccagggcagagtcaccatgaccagggacacctccataagcacagcctacatggagctgagcagcctgagatctgacgacacggccgtgtattactgtgcgagagggggtgattacgtttgggggagttatcgtccctactactactactacggtatggacgtctggggccaagggaccacggtcaccgtctcctcagcctccaccaagggcccatcggtcttccccctggcaccctcctccaagagcacctctgggggcacagcggccctgggctgcctggtcaaggactacttccccgaaccggtgacggtgtcgtggaactcaggcgccctgaccagcggcgtgcacaccttcccggctgtcctacagtcctcaggactctactccctcagcagcgtggtgaccgtgccctccagcagcttgggcacccagacctacatctgcaacgtgaatcacaagcccagcaacaccaaggtggacaagaaagttgagcccaaatcttgtgacaaaactcacacatgcccaccgtgcccagcacctgaactcctggggggaccgtcagtcttcctcttccccccaaaacccaaggacaccctcatgatctcccggacccctgaggtcacatgcgtggtggtggacgtgagccacgaagaccctgaggtcaagttcaactggtacgtggacggcgtggaggtgcataatgccaagacaaagccgtgtgaggagcagtacggcagcacgtaccgttgtgtcagcgtcctcaccgtcctgcaccaggactggctgaatggcaaggagtacaagtgcaaggtctccaacaaagccctcccagcccccatcgagaaaaccatctccaaagccaaagggcagccccgagaaccacaggtgtacaccctgcccccatcccgggaggagatgaccaagaaccaggtcagcctgacctgcctggtcaaaggcttctatcccagcgacatcgccgtggagtgggagagcaatgggcagccggagaacaactacaagaccacgcctcccgtgctggactccgacggctccttcttcctctatagcaagctcaccgtggacaagagcaggtggcagcaggggaacgtcttctcatgctccgtgatgcatgaggctctgcacaaccactacacgcagaagagcctctccctgtctccgggtaaa

SEQ ID NO: 2194 - DNA, 1377 bp, Artificial Sequence; identical to SEQ ID NO: 2190
  source: /note="Description of Artificial Sequence: Synthetic polynucleotide"

SEQ ID NO: 2195 - DNA, 1377 bp, Artificial Sequence
  source: /note="Description of Artificial Sequence: Synthetic polynucleotide"
caaatgcagctggtgcagtctggggctgaggtgaagaagcctggggcctcagtgaaggtctcctgcaaggcttctggatacaccttcaccagttatgatatcaactgggtgcgacaggcccctggacaagggcttgagtggatgggatggatgaaccctaacagtggtaacacaggctatgcacagaagttccagggcagagtcaccatgaccagggacacctccataagcacagcctacatggagctgagcagcctgagatctgacgacacggccgtgtattactgtgcgagagggggtgattacgtttgggggagttatcgtccctactactactactacggtatggacgtctggggccaagggaccacggtcaccgtctcctcagcctccaccaagggcccatcggtcttccccctggcaccctcctccaagagcacctctgggggcacagcggccctgggctgcctggtcaaggactacttccccgaaccggtgacggtgtcgtggaactcaggcgccctgaccagcggcgtgcacaccttcccggctgtcctacagtcctcaggactctactccctcagcagcgtggtgaccgtgccctccagcagcttgggcacccagacctacatctgcaacgtgaatcacaagcccagcaacaccaaggtggacaagaaagttgagcccaaatcttgtgacaaaactcacacatgcccaccgtgcccagcacctgaactcctggggggaccgtcagtcttcctcttccccccaaaacccaaggacaccctcatgatctcccggacccctgaggtcacatgcgtggtggtggacgtgagccacgaagaccctgaggtcaagttcaactggtacgtggacggcgtggaggtgcataatgccaagacaaagccgtgtgaggagcagtacggcagcacgtaccgttgtgtcagcgtcctcaccgtcctgcaccaggactggctgaatggcaaggagtacaagtgcaaggtctccaacaaagccctcccagcccccatcgagaaaaccatctccaaagccaaagggcagccccgagaaccacaggtgtacaccctgcccccatcccgggaggagatgaccaagaaccaggtcagcctgacctgcctggtcaaaggcttctatcccagcgacatcgccgtggagtgggagagcaatgggcagccggagaacaactacaagaccacgcctcccgtgctggactccgacggctccttcttcctctatagcaagctcaccgtggacaagagcaggtggcagcaggggaacgtcttctcatgctccgtgatgcatgaggctctgcacaaccactacacgcagaagagcctctccctgtctccgggtaaa

SEQ ID NO: 2196 - DNA, 1377 bp, Artificial Sequence
  source: /note="Description of Artificial Sequence: Synthetic polynucleotide"
caaatgcagctggtgcagtctggggctgaggtgaagaagcctggggcctcagtgaaggtctcctgcaaggcttctggatacaccttcaccagttatgatatcaactgggtgcgacaggccactggacaagggcttgagtggatgggatggatgaaccctaacagtggtggcacaggctatgcacagaagttccagggcagagtcaccatgaccagggacacctccataagcacagcctacatggagctgagcagcctgagatctcaggacacggccgtgtattactgtgcgagagggggtgattacgttttcgggagttatcgtccctactactactactacggtatggacgtctggggccaagggaccacggtcaccgtctcctcagcctccaccaagggcccatcggtcttccccctggcaccctcctccaagagcacctctgggggcacagcggccctgggctgcctggtcaaggactacttccccgaaccggtgacggtgtcgtggaactcaggcgccctgaccagcggcgtgcacaccttcccggctgtcctacagtcctcaggactctactccctcagcagcgtggtgaccgtgccctccagcagcttgggcacccagacctacatctgcaacgtgaatcacaagcccagcaacaccaaggtggacaagaaagttgagcccaaatcttgtgacaaaactcacacatgcccaccgtgcccagcacctgaactcctggggggaccgtcagtcttcctcttccccccaaaacccaaggacaccctcatgatctcccggacccctgaggtcacatgcgtggtggtggacgtgagccacgaagaccctgaggtcaagttcaactggtacgtggacggcgtggaggtgcataatgccaagacaaagccgtgtgaggagcagtacggcagcacgtaccgttgtgtcagcgtcctcaccgtcctgcaccaggactggctgaatggcaaggagtacaagtgcaaggtctccaacaaagccctcccagcccccatcgagaaaaccatctccaaagccaaagggcagccccgagaaccacaggtgtacaccctgcccccatcccgggaggagatgaccaagaaccaggtcagcctgacctgcctggtcaaaggcttctatcccagcgacatcgccgtggagtgggagagcaatgggcagccggagaacaactacaagaccacgcctcccgtgctggactccgacggctccttcttcctctatagcaagctcaccgtggacaagagcaggtggcagcaggggaacgtcttctcatgctccgtgatgcatgaggctctgcacaaccactacacgcagaagagcctctccctgtctccgggtaaa

SEQ ID NO: 2197 - DNA, 1377 bp, Artificial Sequence
  source: /note="Description of Artificial Sequence: Synthetic polynucleotide"
caaatgcagctggtgcagtctggggctgaggtgaagaagcctggggcctcagtgaaggtctcctgcaaggcttctggatacaccttcaccagttatgatatcaactgggtgcgacaggcccctggacaagggcttgagtggatgggatggatgaaccctaacagtggtggcacaggctatgcacagaagttccagggcagagtcaccatgaccagggacacctccataagcacagcctacatggagctgagcagcctgagatctgacgacacggccgtgtattactgtgcgagagggggtgattacgttttcgggagttatcgtccctactactactactacggtatggacgtctggggccaagggaccacggtcaccgtctcctcagcctccaccaagggcccatcggtcttccccctggcaccctcctccaagagcacctctgggggcacagcggccctgggctgcctggtcaaggactacttccccgaaccggtgacggtgtcgtggaactcaggcgccctgaccagcggcgtgcacaccttcccggctgtcctacagtcctcaggactctactccctcagcagcgtggtgaccgtgccctccagcagcttgggcacccagacctacatctgcaacgtgaatcacaagcccagcaacaccaaggtggacaagaaagttgagcccaaatcttgtgacaaaactcacacatgcccaccgtgcccagcacctgaactcctggggggaccgtcagtcttcctcttccccccaaaacccaaggacaccctcatgatctcccggacccctgaggtcacatgcgtggtggtggacgtgagccacgaagaccctgaggtcaagttcaactggtacgtggacggcgtggaggtgcataatgccaagacaaagccgtgtgaggagcagtacggcagcacgtaccgttgtgtcagcgtcctcaccgtcctgcaccaggactggctgaatggcaaggagtacaagtgcaaggtctccaacaaagccctcccagcccccatcgagaaaaccatctccaaagccaaagggcagccccgagaaccacaggtgtacaccctgcccccatcccgggaggagatgaccaagaaccaggtcagcctgacctgcctggtcaaaggcttctatcccagcgacatcgccgtggagtgggagagcaatgggcagccggagaacaactacaagaccacgcctcccgtgctggactccgacggctccttcttcctctatagcaagctcaccgtggacaagagcaggtggcagcaggggaacgtcttctcatgctccgtgatgcatgaggctctgcacaaccactacacgcagaagagcctctccctgtctccgggtaaa

SEQ ID NO: 2198 - DNA, 1353 bp, Artificial Sequence; identical to SEQ ID NO: 2187
  source: /note="Description of Artificial Sequence: Synthetic polynucleotide"

SEQ ID NO: 2199 - DNA, 39 bp, Artificial Sequence
  source: /note="Description of Artificial Sequence: Synthetic oligonucleotide"
tctggaagtagctccaacatcggaagtaatactgtaaac

SEQ ID NO: 2200 - DNA, 33 bp, Artificial Sequence
  source: /note="Description of Artificial Sequence: Synthetic oligonucleotide"
cgggcaagtcaggacattagagattatttaggc

SEQ ID NO: 2201 - DNA, 33 bp, Artificial Sequence; identical to SEQ ID NO: 2200
  source: /note="Description of Artificial Sequence: Synthetic oligonucleotide"

SEQ ID NO: 2202 - DNA, 33 bp, Artificial Sequence
  source: /note="Description of Artificial Sequence: Synthetic oligonucleotide"
caggcgagtcaggacattagcaactatttaaat

SEQ ID NO: 2203 - DNA, 51 bp, Artificial Sequence
  source: /note="Description of Artificial Sequence: Synthetic oligonucleotide"
aagtccagccagagtgttttatccagctccaacaataagaactacatagct

SEQ ID NO: 2204 - DNA, 51 bp, Artificial Sequence; identical to SEQ ID NO: 2203
  source: /note="Description of Artificial Sequence: Synthetic oligonucleotide"

SEQ ID NO: 2205 - DNA, 51 bp, Artificial Sequence
  source: /note="Description of Artificial Sequence: Synthetic oligonucleotide"
aagtccagccagagtgttttatccagctccaacaataagaactacttagct

SEQ ID NO: 2206 - DNA, 51 bp, Artificial Sequence; identical to SEQ ID NO: 2205
  source: /note="Description of Artificial Sequence: Synthetic oligonucleotide"

SEQ ID NO: 2207 - DNA, 36 bp, Artificial Sequence
  source: /note="Description of Artificial Sequence: Synthetic oligonucleotide"
agggccagtcagagtattagttacagttacttagcc

SEQ ID NO: 2208 - DNA, 33 bp, Artificial Sequence
  source: /note="Description of Artificial Sequence: Synthetic oligonucleotide"
agggccagtcagagtgttagcagcaacttagcc

SEQ ID NO: 2209 - DNA, 33 bp, Artificial Sequence
  source: /note="Description of Artificial Sequence: Synthetic oligonucleotide"
cgggcaagtcagggcattagaaatgagttaggc

SEQ ID NO: 2210 - DNA, 33 bp, Artificial Sequence
  source: /note="Description of Artificial Sequence: Synthetic oligonucleotide"
caggcgagtcaggacattaccaactatttaaat

SEQ ID NO: 2211 - DNA, 33 bp, Artificial Sequence
  source: /note="Description of Artificial Sequence: Synthetic oligonucleotide"
cgggcgagtcagggtcttatcatctggttagcc

SEQ ID NO: 2212 - DNA, 33 bp, Artificial Sequence; identical to SEQ ID NO: 2211
  source: /note="Description of Artificial Sequence: Synthetic oligonucleotide"

SEQ ID NO: 2213 - DNA, 33 bp, Artificial Sequence; identical to SEQ ID NO: 2209
  source: /note="Description of Artificial Sequence: Synthetic oligonucleotide"

SEQ ID NO: 2214 - DNA, 33 bp, Artificial Sequence; identical to SEQ ID NO: 2209
  source: /note="Description of Artificial Sequence: Synthetic oligonucleotide"

SEQ ID NO: 2215 - DNA, 33 bp, Artificial Sequence; identical to SEQ ID NO: 2209
  source: /note="Description of Artificial Sequence: Synthetic oligonucleotide"

SEQ ID NO: 2216 - DNA, 33 bp, Artificial Sequence; identical to SEQ ID NO: 2209
  source: /note="Description of Artificial Sequence: Synthetic oligonucleotide"

SEQ ID NO: 2217 - DNA, 33 bp, Artificial Sequence; identical to SEQ ID NO: 2209
  source: /note="Description of Artificial Sequence: Synthetic oligonucleotide"

SEQ ID NO: 2218 - DNA, 33 bp, Artificial Sequence; identical to SEQ ID NO: 2209
  source: /note="Description of Artificial Sequence: Synthetic oligonucleotide"

SEQ ID NO: 2219 - DNA, 33 bp, Artificial Sequence; identical to SEQ ID NO: 2200
  source: /note="Description of Artificial Sequence: Synthetic oligonucleotide"

SEQ ID NO: 2220 - DNA, 33 bp, Artificial Sequence; identical to SEQ ID NO: 2200
  source: /note="Description of Artificial Sequence: Synthetic oligonucleotide"

SEQ ID NO: 2221 - DNA, 33 bp, Artificial Sequence; identical to SEQ ID NO: 2200
  source: /note="Description of Artificial Sequence: Synthetic oligonucleotide"

SEQ ID NO: 2222 - DNA, 33 bp, Artificial Sequence; identical to SEQ ID NO: 2200
  source: /note="Description of Artificial Sequence: Synthetic oligonucleotide"

SEQ ID NO: 2223 - DNA, 33 bp, Artificial Sequence; identical to SEQ ID NO: 2200
  source: /note="Description of Artificial Sequence: Synthetic oligonucleotide"

SEQ ID NO: 2224 - DNA, 33 bp, Artificial Sequence; identical to SEQ ID NO: 2200
  source: /note="Description of Artificial Sequence: Synthetic oligonucleotide"

SEQ ID NO: 2225 - DNA, 33 bp, Artificial Sequence; identical to SEQ ID NO: 2200
  source: /note="Description of Artificial Sequence: Synthetic oligonucleotide"

SEQ ID NO: 2226 - DNA, 33 bp, Artificial Sequence
  source: /note="Description of Artificial Sequence: Synthetic oligonucleotide"
cgggcaagtcaggaccttagaaattatttaggc

SEQ ID NO: 2227 - DNA, 33 bp, Artificial Sequence; identical to SEQ ID NO: 2226
  source: /note="Description of Artificial Sequence: Synthetic oligonucleotide"

SEQ ID NO: 2228 - DNA, 33 bp, Artificial Sequence; identical to SEQ ID NO: 2226
  source: /note="Description of Artificial Sequence: Synthetic oligonucleotide"

SEQ ID NO: 2229 - DNA, 33 bp, Artificial Sequence; identical to SEQ ID NO: 2226
  source: /note="Description of Artificial Sequence: Synthetic oligonucleotide"

SEQ ID NO: 2230 - DNA, 33 bp, Artificial Sequence; identical to SEQ ID NO: 2226
  source: /note="Description of Artificial Sequence: Synthetic oligonucleotide"

SEQ ID NO: 2231 - DNA, 33 bp, Artificial Sequence; identical to SEQ ID NO: 2226
  source: /note="Description of Artificial Sequence: Synthetic oligonucleotide"

SEQ ID NO: 2232 - DNA, 33 bp, Artificial Sequence; identical to SEQ ID NO: 2226
  source: /note="Description of Artificial Sequence: Synthetic oligonucleotide"

SEQ ID NO: 2233 - DNA, 33 bp, Artificial Sequence; identical to SEQ ID NO: 2226
  source: /note="Description of Artificial Sequence: Synthetic oligonucleotide"

SEQ ID NO: 2234 - DNA, 33 bp, Artificial Sequence; identical to SEQ ID NO: 2226
  source: /note="Description of Artificial Sequence: Synthetic oligonucleotide"

SEQ ID NO: 2235 - DNA, 33 bp, Artificial Sequence; identical to SEQ ID NO: 2226
  source: /note="Description of Artificial Sequence: Synthetic oligonucleotide"

SEQ ID NO: 2236 - DNA, 33 bp, Artificial Sequence; identical to SEQ ID NO: 2226
  source: /note="Description of Artificial Sequence: Synthetic oligonucleotide"

SEQ ID NO: 2237 - DNA, 33 bp, Artificial Sequence; identical to SEQ ID NO: 2226
  source: /note="Description of Artificial Sequence: Synthetic oligonucleotide"

SEQ ID NO: 2238 - DNA, 33 bp, Artificial Sequence; identical to SEQ ID NO: 2202
  source: /note="Description of Artificial Sequence: Synthetic oligonucleotide"

SEQ ID NO: 2239 - DNA, 33 bp, Artificial Sequence; identical to SEQ ID NO: 2202
  source: /note="Description of Artificial Sequence: Synthetic oligonucleotide"

SEQ ID NO: 2240 - DNA, 33 bp, Artificial Sequence; identical to SEQ ID NO: 2202
  source: /note="Description of Artificial Sequence: Synthetic oligonucleotide"

SEQ ID NO: 2241 - DNA, 33 bp, Artificial Sequence; identical to SEQ ID NO: 2202
  source: /note="Description of Artificial Sequence: Synthetic oligonucleotide"

SEQ ID NO: 2242 - DNA, 33 bp, Artificial Sequence; identical to SEQ ID NO: 2202
  source: /note="Description of Artificial Sequence: Synthetic oligonucleotide"

SEQ ID NO: 2243 - DNA, 33 bp, Artificial Sequence; identical to SEQ ID NO: 2202
  source: /note="Description of Artificial Sequence: Synthetic oligonucleotide"

SEQ ID NO: 2244 - DNA, 33 bp, Artificial Sequence; identical to SEQ ID NO: 2202
  source: /note="Description of Artificial Sequence: Synthetic oligonucleotide"

SEQ ID NO: 2245 - DNA, 33 bp, Artificial Sequence; identical to SEQ ID NO: 2202
  source: /note="Description of Artificial Sequence: Synthetic oligonucleotide"

SEQ ID NO: 2246 - DNA, 33 bp, Artificial Sequence; identical to SEQ ID NO: 2202
  source: /note="Description of Artificial Sequence: Synthetic oligonucleotide"

SEQ ID NO: 2247 - DNA, 33 bp, Artificial Sequence; identical to SEQ ID NO: 2200
  source: /note="Description of Artificial Sequence: Synthetic oligonucleotide"

SEQ ID NO: 2248 - DNA, 33 bp, Artificial Sequence; identical to SEQ ID NO: 2200
  source: /note="Description of Artificial Sequence: Synthetic oligonucleotide"

SEQ ID NO: 2249 - DNA, 33 bp, Artificial Sequence; identical to SEQ ID NO: 2200
  source: /note="Description of Artificial Sequence: Synthetic oligonucleotide"

SEQ ID NO: 2250 - DNA, 33 bp, Artificial Sequence; identical to SEQ ID NO: 2200
  source: /note="Description of Artificial Sequence: Synthetic oligonucleotide"

SEQ ID NO: 2251 - DNA, 33 bp, Artificial Sequence; identical to SEQ ID NO: 2200
  source: /note="Description of Artificial Sequence: Synthetic oligonucleotide"

SEQ ID NO: 2252 - DNA, 33 bp, Artificial Sequence; identical to SEQ ID NO: 2200
  source: /note="Description of Artificial Sequence: Synthetic oligonucleotide"

SEQ ID NO: 2253 - DNA, 33 bp, Artificial Sequence; identical to SEQ ID NO: 2200
  source: /note="Description of Artificial Sequence: Synthetic oligonucleotide"

SEQ ID NO: 2254 - DNA, 33 bp, Artificial Sequence; identical to SEQ ID NO: 2210
  source: /note="Description of Artificial Sequence: Synthetic oligonucleotide"

SEQ ID NO: 2255 - DNA, 33 bp, Artificial Sequence; identical to SEQ ID NO: 2210
  source: /note="Description of Artificial Sequence: Synthetic oligonucleotide"

SEQ ID NO: 2256 - DNA, 33 bp, Artificial Sequence; identical to SEQ ID NO: 2210
  source: /note="Description of Artificial Sequence: Synthetic oligonucleotide"

SEQ ID NO: 2257 - DNA, 33 bp, Artificial Sequence; identical to SEQ ID NO: 2210
  source: /note="Description of Artificial Sequence: Synthetic oligonucleotide"

SEQ ID NO: 2258 - DNA, 33 bp, Artificial Sequence; identical to SEQ ID NO: 2210
  source: /note="Description of Artificial Sequence: Synthetic oligonucleotide"

SEQ ID NO: 2259 - DNA, 33 bp, Artificial Sequence; identical to SEQ ID NO: 2210
  source: /note="Description of Artificial Sequence: Synthetic oligonucleotide"

SEQ ID NO: 2260 - DNA, 33 bp, Artificial Sequence; identical to SEQ ID NO: 2210
  source: /note="Description of Artificial Sequence: Synthetic oligonucleotide"

SEQ ID NO: 2261 - DNA, 33 bp, Artificial Sequence; identical to SEQ ID NO: 2210
  source: /note="Description of Artificial Sequence: Synthetic oligonucleotide"

SEQ ID NO: 2262 - DNA, 33 bp, Artificial Sequence; identical to SEQ ID NO: 2210
  source: /note="Description of Artificial Sequence: Synthetic oligonucleotide"

SEQ ID NO: 2263 - DNA, 33 bp, Artificial Sequence; identical to SEQ ID NO: 2210
  source: /note="Description of Artificial Sequence: Synthetic oligonucleotide"

SEQ ID NO: 2264 - DNA, 33 bp, Artificial Sequence; identical to SEQ ID NO: 2210
  source: /note="Description of Artificial Sequence: Synthetic oligonucleotide"

SEQ ID NO: 2265 - DNA, 36 bp, Artificial Sequence
  source: /note="Description of Artificial Sequence: Synthetic oligonucleotide"
agggccagtcagatttttaccagcacctacttagcc

SEQ ID NO: 2266 - DNA, 36 bp, Artificial Sequence; identical to SEQ ID NO: 2265
  source: /note="Description of Artificial Sequence: Synthetic oligonucleotide"

SEQ ID NO: 2267 - DNA, 36 bp, Artificial Sequence; identical to SEQ ID NO: 2265
  source: /note="Description of Artificial Sequence: Synthetic oligonucleotide"

SEQ ID NO: 2268 - DNA, 36 bp, Artificial Sequence; identical to SEQ ID NO: 2265
  source: /note="Description of Artificial Sequence: Synthetic oligonucleotide"

SEQ ID NO: 2269 - DNA, 33 bp, Artificial Sequence; identical to SEQ ID NO: 2208
  source: /note="Description of Artificial Sequence: Synthetic oligonucleotide"

SEQ ID NO: 2270 - DNA, 33 bp, Artificial Sequence; identical to SEQ ID NO: 2208
  source: /note="Description of Artificial Sequence: Synthetic oligonucleotide"

SEQ ID NO: 2271 - DNA, 33 bp, Artificial Sequence; identical to SEQ ID NO: 2208
  source: /note="Description of Artificial Sequence: Synthetic oligonucleotide"

SEQ ID NO: 2272 - DNA, 33 bp, Artificial Sequence; identical to SEQ ID NO: 2208
  source: /note="Description of Artificial Sequence: Synthetic oligonucleotide"

SEQ ID NO: 2273 - DNA, 33 bp, Artificial Sequence; identical to SEQ ID NO: 2208
  source: /note="Description of Artificial Sequence: Synthetic oligonucleotide"

SEQ ID NO: 2274 - DNA, 33 bp, Artificial Sequence; identical to SEQ ID NO: 2208
  source: /note="Description of Artificial Sequence: Synthetic oligonucleotide"

SEQ ID NO: 2275 - DNA, 33 bp, Artificial Sequence; identical to SEQ ID NO: 2208
  source: /note="Description of Artificial Sequence: Synthetic oligonucleotide"

SEQ ID NO: 2276 - DNA, 33 bp, Artificial Sequence; identical to SEQ ID NO: 2208
  source: /note="Description of Artificial Sequence: Synthetic oligonucleotide"

SEQ ID NO: 2277 - DNA, 36 bp, Artificial Sequence; identical to SEQ ID NO: 2207
  source: /note="Description of Artificial Sequence: Synthetic oligonucleotide"

SEQ ID NO: 2278 - DNA, 36 bp, Artificial Sequence; identical to SEQ ID NO: 2207
  source: /note="Description of Artificial Sequence: Synthetic oligonucleotide"

SEQ ID NO: 2279 - DNA, 36 bp, Artificial Sequence; identical to SEQ ID NO: 2207
  source: /note="Description of Artificial Sequence: Synthetic oligonucleotide"

SEQ ID NO: 2280 - DNA, 36 bp, Artificial Sequence; identical to SEQ ID NO: 2207
  source: /note="Description of Artificial Sequence: Synthetic oligonucleotide"

SEQ ID NO: 2281 - DNA, 36 bp, Artificial Sequence; identical to SEQ ID NO: 2207
  source: /note="Description of Artificial Sequence: Synthetic oligonucleotide"

SEQ ID NO: 2282 - DNA, 36 bp, Artificial Sequence; identical to SEQ ID NO: 2207
  source: /note="Description of Artificial Sequence: Synthetic oligonucleotide"

SEQ ID NO: 2283 - DNA, 36 bp, Artificial Sequence; identical to SEQ ID NO: 2207
  source: /note="Description of Artificial Sequence: Synthetic oligonucleotide"

SEQ ID NO: 2284 - DNA, 51 bp, Artificial Sequence; identical to SEQ ID NO: 2203
  source: /note="Description of Artificial Sequence: Synthetic oligonucleotide"

SEQ ID NO: 2285 - DNA, 51 bp, Artificial Sequence; identical to SEQ ID NO: 2203
  source: /note="Description of Artificial Sequence: Synthetic oligonucleotide"

SEQ ID NO: 2286 - DNA, 51 bp, Artificial Sequence; identical to SEQ ID NO: 2203
  source: /note="Description of Artificial Sequence: Synthetic oligonucleotide"

SEQ ID NO: 2287 - DNA, 51 bp, Artificial Sequence; identical to SEQ ID NO: 2203
  source: /note="Description of Artificial Sequence: Synthetic oligonucleotide"

SEQ ID NO: 2288 - DNA, 51 bp, Artificial Sequence; identical to SEQ ID NO: 2203
  source: /note="Description of Artificial Sequence: Synthetic oligonucleotide"

SEQ ID NO: 2289 - DNA, 51 bp, Artificial Sequence; identical to SEQ ID NO: 2203
  source: /note="Description of Artificial Sequence: Synthetic oligonucleotide"

SEQ ID NO: 2290 - DNA, 51 bp, Artificial Sequence; identical to SEQ ID NO: 2203
  source: /note="Description of Artificial Sequence: Synthetic oligonucleotide"

SEQ ID NO: 2291 - DNA, 51 bp, Artificial Sequence; identical to SEQ ID NO: 2203
  source: /note="Description of Artificial Sequence: Synthetic oligonucleotide"

SEQ ID NO: 2292 - DNA, 51 bp, Artificial Sequence; identical to SEQ ID NO: 2203
  source: /note="Description of Artificial Sequence: Synthetic oligonucleotide"

SEQ ID NO: 2293 - DNA, 51 bp, Artificial Sequence; identical to SEQ ID NO: 2203
  source: /note="Description of Artificial Sequence: Synthetic oligonucleotide"

SEQ ID NO: 2294 - DNA, 51 bp, Artificial Sequence; identical to SEQ ID NO: 2203
  source: /note="Description of Artificial Sequence: Synthetic oligonucleotide"

SEQ ID NO: 2295 - DNA, 51 bp, Artificial Sequence; identical to SEQ ID NO: 2205
  source: /note="Description of Artificial Sequence: Synthetic oligonucleotide"

SEQ ID NO: 2296 - DNA, 51 bp, Artificial Sequence; identical to SEQ ID NO: 2205
  source: /note="Description of Artificial Sequence: Synthetic oligonucleotide"

SEQ ID NO: 2297 - DNA, 51 bp, Artificial Sequence; identical to SEQ ID NO: 2205
  source: /note="Description of Artificial Sequence: Synthetic oligonucleotide"

SEQ ID NO: 2298 - DNA, 51 bp, Artificial Sequence; identical to SEQ ID NO: 2205
  source: /note="Description of Artificial Sequence: Synthetic oligonucleotide"

SEQ ID NO: 2299 - DNA, 51 bp, Artificial Sequence; identical to SEQ ID NO: 2205
  source: /note="Description of Artificial Sequence: Synthetic oligonucleotide"

SEQ ID NO: 2300 - DNA, 51 bp, Artificial Sequence; identical to SEQ ID NO: 2205
  source: /note="Description of Artificial Sequence: Synthetic oligonucleotide"

SEQ ID NO: 2301 - DNA, 51 bp, Artificial Sequence; identical to SEQ ID NO: 2205
  source: /note="Description of Artificial Sequence: Synthetic oligonucleotide"

SEQ ID NO: 2302 - DNA, 51 bp, Artificial Sequence; identical to SEQ ID NO: 2205
  source: /note="Description of Artificial Sequence: Synthetic oligonucleotide"

SEQ ID NO: 2303 - DNA, 51 bp, Artificial Sequence; identical to SEQ ID NO: 2205
  source: /note="Description of Artificial Sequence: Synthetic oligonucleotide"

SEQ ID NO: 2304 - DNA, 51 bp, Artificial Sequence; identical to SEQ ID NO: 2203
  source: /note="Description of Artificial Sequence: Synthetic oligonucleotide"

SEQ ID NO: 2305 - DNA, 51 bp, Artificial Sequence; identical to SEQ ID NO: 2203
  source: /note="Description of Artificial Sequence: Synthetic oligonucleotide"

SEQ ID NO: 2306 - DNA, 51 bp, Artificial Sequence; identical to SEQ ID NO: 2203
  source: /note="Description of Artificial Sequence: Synthetic oligonucleotide"

SEQ ID NO: 2307 - DNA, 51 bp, Artificial Sequence; identical to SEQ ID NO: 2203
  source: /note="Description of Artificial Sequence: Synthetic oligonucleotide"

SEQ ID NO: 2308 - DNA, 51 bp, Artificial Sequence; identical to SEQ ID NO: 2203
  source: /note="Description of Artificial Sequence: Synthetic oligonucleotide"

SEQ ID NO: 2309 - DNA, 51 bp, Artificial Sequence; identical to SEQ ID NO: 2205
  source: /note="Description of Artificial Sequence: Synthetic oligonucleotide"

SEQ ID NO: 2310 - DNA, 51 bp, Artificial Sequence; identical to SEQ ID NO: 2205
  source: /note="Description of Artificial Sequence: Synthetic oligonucleotide"

SEQ ID NO: 2311 - DNA, 51 bp, Artificial Sequence; identical to SEQ ID NO: 2205
  source: /note="Description of Artificial Sequence: Synthetic oligonucleotide"

SEQ ID NO: 2312 - DNA, 51 bp, Artificial Sequence; identical to SEQ ID NO: 2205
  source: /note="Description of Artificial Sequence: Synthetic oligonucleotide"

SEQ ID NO: 2313 - DNA, 51 bp, Artificial Sequence; identical to SEQ ID NO: 2205
  source: /note="Description of Artificial Sequence: Synthetic oligonucleotide"

SEQ ID NO: 2314 - DNA, 51 bp, Artificial Sequence; identical to SEQ ID NO: 2205
  source: /note="Description of Artificial Sequence: Synthetic oligonucleotide"

SEQ ID NO: 2315 - DNA, 51 bp, Artificial Sequence; identical to SEQ ID NO: 2205
  source: /note="Description of Artificial Sequence: Synthetic oligonucleotide"

SEQ ID NO: 2316 - DNA, 51 bp, Artificial Sequence; identical to SEQ ID NO: 2205
  source: /note="Description of Artificial Sequence: Synthetic oligonucleotide"

SEQ ID NO: 2317 - DNA, 51 bp, Artificial Sequence; identical to SEQ ID NO: 2205
  source: /note="Description of Artificial Sequence: Synthetic oligonucleotide"

SEQ ID NO: 2318 - DNA, 51 bp, Artificial Sequence; identical to SEQ ID NO: 2205
  source: /note="Description of Artificial Sequence: Synthetic oligonucleotide"

SEQ ID NO: 2319 - DNA, 51 bp, Artificial Sequence; identical to SEQ ID NO: 2205
  source: /note="Description of Artificial Sequence: Synthetic oligonucleotide"

SEQ ID NO: 2320 - DNA, 51 bp, Artificial Sequence; identical to SEQ ID NO: 2205
  source: /note="Description of Artificial Sequence: Synthetic oligonucleotide"

SEQ ID NO: 2321 - DNA, 51 bp, Artificial Sequence; identical to SEQ ID NO: 2205
  source: /note="Description of Artificial Sequence: Synthetic oligonucleotide"

SEQ ID NO: 2322 - DNA, 39 bp, Artificial Sequence
  source: /note="Description of Artificial Sequence: Synthetic oligonucleotide"
tctggaagtagctccaacatcggaagtcaaactgtaaac

SEQ ID NO: 2323 - DNA, 39 bp, Artificial Sequence; identical to SEQ ID NO: 2322
  source: /note="Description of Artificial Sequence: Synthetic oligonucleotide"

SEQ ID NO: 2324 - DNA, 39 bp, Artificial Sequence
  source: /note="Description of Artificial Sequence: Synthetic oligonucleotide"
tctggaagtagctccaacatcggaagtaattatgtaaac

SEQ ID NO: 2325 - DNA, 39 bp, Artificial Sequence; identical to SEQ ID NO: 2324
  source: /note="Description of Artificial Sequence: Synthetic oligonucleotide"

SEQ ID NO: 2326 - DNA, 39 bp, Artificial Sequence; identical to SEQ ID NO: 2322
  source: /note="Description of Artificial Sequence: Synthetic oligonucleotide"

SEQ ID NO: 2327 - DNA, 39 bp, Artificial Sequence; identical to SEQ ID NO: 2324
  source: /note="Description of Artificial Sequence: Synthetic oligonucleotide"

SEQ ID NO: 2328 - DNA, 39 bp, Artificial Sequence; identical to SEQ ID NO: 2199
  source: /note="Description of Artificial Sequence: Synthetic oligonucleotide"

SEQ ID NO: 2329 - DNA, 39 bp, Artificial Sequence; identical to SEQ ID NO: 2199
  source: /note="Description of Artificial Sequence: Synthetic oligonucleotide"

SEQ ID NO: 2330 - DNA, 39 bp, Artificial Sequence; identical to SEQ ID NO: 2199
  source: /note="Description of Artificial Sequence: Synthetic oligonucleotide"

SEQ ID NO: 2331 - DNA, 39 bp, Artificial Sequence; identical to SEQ ID NO: 2199
  source: /note="Description of Artificial Sequence: Synthetic oligonucleotide"

SEQ ID NO: 2332 - DNA, 39 bp, Artificial Sequence; identical to SEQ ID NO: 2199
  source: /note="Description of Artificial Sequence: Synthetic oligonucleotide"

SEQ ID NO: 2333 - DNA, 39 bp, Artificial Sequence; identical to SEQ ID NO: 2324
  source: /note="Description of Artificial Sequence: Synthetic oligonucleotide"

SEQ ID NO: 2334 - DNA, 39 bp, Artificial Sequence; identical to SEQ ID NO: 2324
  source: /note="Description of Artificial Sequence: Synthetic oligonucleotide"

SEQ ID NO: 2335 - DNA, 39 bp, Artificial Sequence; identical to SEQ ID NO: 2322
  source: /note="Description of Artificial Sequence: Synthetic oligonucleotide"

SEQ ID NO: 2336 - DNA, 33 bp, Artificial Sequence; identical to SEQ ID NO: 2226
  source: /note="Description of Artificial Sequence: Synthetic oligonucleotide"

SEQ ID NO: 2337 - DNA, 33 bp, Artificial Sequence; identical to SEQ ID NO: 2200
  source: /note="Description of Artificial Sequence: Synthetic oligonucleotide"

SEQ ID NO: 2338 - DNA, 39 bp, Artificial Sequence; identical to SEQ ID NO: 2199
  source: /note="Description of Artificial Sequence: Synthetic oligonucleotide"

SEQ ID NO: 2339 - DNA, 33 bp, Artificial Sequence
  source: /note="Description of Artificial Sequence: Synthetic oligonucleotide"
cgggcaagtcagaccattagcaggtttttaaat

SEQ ID NO: 2340 - DNA, 39 bp, Artificial Sequence
  source: /note="Description of Artificial Sequence: Synthetic oligonucleotide"
tctggaagcagctccaacattggaaataattatgtatcc

SEQ ID NO: 2341 - DNA, 33 bp, Artificial Sequence; identical to SEQ ID NO: 2339
  source: /note="Description of Artificial Sequence: Synthetic oligonucleotide"

SEQ ID NO: 2342 - DNA, 33 bp, Artificial Sequence; identical to SEQ ID NO: 2339
  source: /note="Description of Artificial Sequence: Synthetic oligonucleotide"

SEQ ID NO: 2343 - DNA, 33 bp, Artificial Sequence; identical to SEQ ID NO: 2339
  source: /note="Description of Artificial Sequence: Synthetic oligonucleotide"

SEQ ID NO: 2344 - DNA, 33 bp, Artificial Sequence; identical to SEQ ID NO: 2339
  source: /note="Description of Artificial Sequence: Synthetic oligonucleotide"

SEQ ID NO: 2345 - DNA, 33 bp, Artificial Sequence; identical to SEQ ID NO: 2339
  source: /note="Description of Artificial Sequence: Synthetic oligonucleotide"

SEQ ID NO: 2346 - DNA, 33 bp, Artificial Sequence; identical to SEQ ID NO: 2339
  source: /note="Description of Artificial Sequence: Synthetic oligonucleotide"

SEQ ID NO: 2347 - DNA, 39 bp, Artificial Sequence; identical to SEQ ID NO: 2340
  source: /note="Description of Artificial Sequence: Synthetic oligonucleotide"

SEQ ID NO: 2348 - DNA, 39 bp, Artificial Sequence; identical to SEQ ID NO: 2340
  source: /note="Description of Artificial Sequence: Synthetic oligonucleotide"

SEQ ID NO: 2349 - DNA, 39 bp, Artificial Sequence; identical to SEQ ID NO: 2340
  source: /note="Description of Artificial Sequence: Synthetic oligonucleotide"

SEQ ID NO: 2350 - DNA, 39 bp, Artificial Sequence; identical to SEQ ID NO: 2340
  source: /note="Description of Artificial Sequence: Synthetic oligonucleotide"

SEQ ID NO: 2351 - DNA, 39 bp, Artificial Sequence; identical to SEQ ID NO: 2340
  source: /note="Description of Artificial Sequence: Synthetic oligonucleotide"

SEQ ID NO: 2352 - DNA, 39 bp, Artificial Sequence; identical to SEQ ID NO: 2340
  source: /note="Description of Artificial Sequence: Synthetic oligonucleotide"

SEQ ID NO: 2353 - DNA, 39 bp, Artificial Sequence; identical to SEQ ID NO: 2340
  source: /note="Description of Artificial Sequence: Synthetic oligonucleotide"

SEQ ID NO: 2354 - DNA, 39 bp, Artificial Sequence; identical to SEQ ID NO: 2340
  source: /note="Description of Artificial Sequence: Synthetic oligonucleotide"

SEQ ID NO: 2355 - DNA, 33 bp, Artificial Sequence; identical to SEQ ID NO: 2339
  source: /note="Description of Artificial Sequence: Synthetic oligonucleotide"

SEQ ID NO: 2356 - DNA, 21 bp, Artificial Sequence
  source: /note="Description of Artificial Sequence: Synthetic oligonucleotide"
actaataatcagcggccctca

SEQ ID NO: 2357 - DNA, 21 bp, Artificial Sequence
  source: /note="Description of Artificial Sequence: Synthetic oligonucleotide"
ggtgcatccagtttgcaaagt

SEQ ID NO: 2358 - DNA, 21 bp, Artificial Sequence
  source: /note="Description of Artificial Sequence: Synthetic oligonucleotide"
ggtgcatccagtttgcaaagt

SEQ ID NO: 2359 - DNA, 21 bp, Artificial Sequence
  source: /note="Description of Artificial Sequence: Synthetic oligonucleotide"
gatgcatccaatttggaaaca

SEQ ID NO: 2360 - DNA, 21 bp, Artificial Sequence
  source: /note="Description of Artificial Sequence: Synthetic oligonucleotide"
tgggcatctacccgggaatcc

SEQ ID NO: 2361 - DNA, 21 bp, Artificial Sequence
  source: /note="Description of Artificial Sequence: Synthetic oligonucleotide"
tgggcatctacccgggaatcc

SEQ ID NO: 2362 - DNA, 21 bp, Artificial Sequence
  source: /note="Description of Artificial Sequence: Synthetic oligonucleotide"
tggacttctacccgagattcc

SEQ ID NO: 2363 - DNA, 21 bp, Artificial Sequence
  source: /note="Description of Artificial Sequence: Synthetic oligonucleotide"
tggacttctacccgagattcc

SEQ ID NO: 2364 - DNA, 21 bp, Artificial Sequence
  source: /note="Description of Artificial Sequence: Synthetic oligonucleotide"
ggtgcatccagcagggccact

SEQ ID NO: 2365 - DNA, 21 bp, Artificial Sequence
  source: /note="Description of Artificial Sequence: Synthetic oligonucleotide"
ggtgcagccaccagggccact

SEQ ID NO: 2366 - DNA, 21 bp, Artificial Sequence
  source: /note="Description of Artificial Sequence: Synthetic oligonucleotide"
ggtgcatccagtttgcaaagt

SEQ ID NO: 2367 - DNA, 21 bp, Artificial Sequence
  source: /note="Description of Artificial Sequence: Synthetic oligonucleotide"
gatgcttccaatttggagcca

SEQ ID NO: 2368 - DNA, 21 bp, Artificial Sequence
  source: /note="Description of Artificial Sequence: Synthetic oligonucleotide"
gctgcatccagtttgcaaagt

SEQ ID NO: 2369 - DNA, 21 bp, Artificial Sequence
  source: /note="Description of Artificial Sequence: Synthetic oligonucleotide"
gctgcatccagtttgcaaagt

SEQ ID NO: 2370 - DNA, 21 bp, Artificial Sequence
  source: /note="Description of Artificial Sequence: Synthetic oligonucleotide"
ggtgcatccagtttgcaaagt

SEQ ID NO: 2371 - DNA, 21 bp, Artificial Sequence
  source: /note="Description of Artificial Sequence: Synthetic oligonucleotide"
ggtgcatccagtttgcaaagt

SEQ ID NO: 2372 - DNA, 21 bp, Artificial Sequence
  source: /note="Description of Artificial Sequence: Synthetic oligonucleotide"
ggtgcatccagtttgcaaagt

SEQ ID NO: 2373 - DNA, 21 bp, Artificial Sequence
  source: /note="Description of Artificial Sequence: Synthetic oligonucleotide"
ggtgcatccagtttgcaaagt

SEQ ID NO: 2374 - DNA, 21 bp, Artificial Sequence
  source: /note="Description of Artificial Sequence: Synthetic oligonucleotide"
ggtgcatccagtttgcaaagt

SEQ ID NO: 2375 - DNA, 21 bp, Artificial Sequence
  source: /note="Description of Artificial Sequence: Synthetic oligonucleotide"
ggtgcatccagtttgcaaagt

SEQ ID NO: 2376 - DNA, 21 bp, Artificial Sequence
  source: /note="Description of Artificial Sequence: Synthetic oligonucleotide"
ggtgcatccagtttgcaaagt

SEQ ID NO: 2377 - DNA, 21 bp, Artificial Sequence
  source: /note="Description of Artificial Sequence: Synthetic oligonucleotide"
ggtgcatccagtttgcaaagt

SEQ ID NO: 2378 - DNA, 21 bp, Artificial Sequence
  source: /note="Description of Artificial Sequence: Synthetic oligonucleotide"
ggtgcatccagtttgcaaagt

SEQ ID NO: 2379 - DNA, 21 bp, Artificial Sequence
  source: /note="Description of Artificial Sequence: Synthetic oligonucleotide"
ggtgcatccagtttgcaaagt

SEQ ID NO: 2380 - DNA, 21 bp, Artificial Sequence
  source: /note="Description of Artificial Sequence: Synthetic oligonucleotide"
ggtgcatccagtttgcaaagt

SEQ ID NO: 2381 - DNA, 21 bp, Artificial Sequence
  source: /note="Description of Artificial Sequence: Synthetic oligonucleotide"
ggtgcatccagtttgcaaagt

SEQ ID NO: 2382 - DNA, 21 bp, Artificial Sequence
  source: /note="Description of Artificial Sequence: Synthetic oligonucleotide"
ggtgcatccagtttgcaaagt

SEQ ID NO: 2383 - DNA, 21 bp, Artificial Sequence
  source: /note="Description of Artificial Sequence: Synthetic oligonucleotide"
ggtgcatccagtttgcaaagt

SEQ ID NO: 2384 - DNA, 21 bp, Artificial Sequence
  source: /note="Description of Artificial Sequence: Synthetic oligonucleotide"
ggtgcatccagtttgcaaagt

SEQ ID NO: 2385 - DNA, 21 bp, Artificial Sequence
  source: /note="Description of Artificial Sequence: Synthetic oligonucleotide"
ggtgcatccagtttgcaaagt

SEQ ID NO: 2386 - DNA, 21 bp, Artificial Sequence
  source: /note="Description of Artificial Sequence: Synthetic oligonucleotide"
ggtgcatccagtttgcaaagt

SEQ ID NO: 2387 - DNA, 21 bp, Artificial Sequence
  source: /note="Description of Artificial Sequence: Synthetic oligonucleotide"
ggtgcatccagtttgcaaagt

SEQ ID NO: 2388 - DNA, 21 bp, Artificial Sequence
  source: /note="Description of Artificial Sequence: Synthetic oligonucleotide"
ggtgcatccagtttgcaaagt

SEQ ID NO: 2389 - DNA, 21 bp, Artificial Sequence
  source: /note="Description of Artificial Sequence: Synthetic oligonucleotide"
ggtgcatccagtttgcaaagt

SEQ ID NO: 2390 - DNA, 21 bp, Artificial Sequence
  source: /note="Description of Artificial Sequence: Synthetic oligonucleotide"
ggtgcatccagtttgcaaagt

SEQ ID NO: 2391 - DNA, 21 bp, Artificial Sequence
  source: /note="Description of Artificial Sequence: Synthetic oligonucleotide"
ggtgcatccagtttgcaaagt

SEQ ID NO: 2392 - DNA, 21 bp, Artificial Sequence
  source: /note="Description of Artificial Sequence: Synthetic oligonucleotide"
ggtgcatccagtttgcaaagt

SEQ ID NO: 2393 - DNA, 21 bp, Artificial Sequence
  source: /note="Description of Artificial Sequence: Synthetic oligonucleotide"
ggtgcatccagtttgcaaagt

SEQ ID NO: 2394 - DNA, 21 bp, Artificial Sequence
  source: /note="Description of Artificial Sequence: Synthetic oligonucleotide"
ggtgcatccagtttgcaaagt

SEQ ID NO: 2395 - DNA, 21 bp, Artificial Sequence
  source: /note="Description of Artificial Sequence: Synthetic oligonucleotide"
gatgcatccaatttggaaaca

SEQ ID NO: 2396 - DNA, 21 bp, Artificial Sequence
  source: /note="Description of Artificial Sequence: Synthetic oligonucleotide"
gatgcatccaatttggaaaca

SEQ ID NO: 2397 - DNA, 21 bp, Artificial Sequence
  source: /note="Description of Artificial Sequence: Synthetic oligonucleotide"
gatgcatccaatttggaaaca

SEQ ID NO: 2398 - DNA, 21 bp, Artificial Sequence
  source: /note="Description of Artificial Sequence: Synthetic oligonucleotide"
gatgcatccaatttggaaaca

SEQ ID NO: 2399 - DNA, 21 bp, Artificial Sequence
  source: /note="Description of Artificial Sequence: Synthetic oligonucleotide"
gatgcatccaatttggaaaca

SEQ ID NO: 2400 - DNA, 21 bp, Artificial Sequence
  source: /note="Description of Artificial Sequence: Synthetic oligonucleotide"
gatgcatccaatttggaaaca

SEQ ID NO: 2401 - DNA, 21 bp, Artificial Sequence
  source: /note="Description of Artificial Sequence: Synthetic oligonucleotide"
gatgcatccaatttggaaaca

SEQ ID NO: 2402 - DNA, 21 bp, Artificial Sequence
  source: /note="Description of Artificial Sequence: Synthetic oligonucleotide"
gatgcatccaatttggaaaca

SEQ ID NO: 2403 - DNA, 21 bp, Artificial Sequence
  source: /note="Description of Artificial Sequence: Synthetic oligonucleotide"
gatgcatccaatttggaaaca

SEQ ID NO: 2404 - DNA, 21 bp, Artificial Sequence
  source: /note="Description of Artificial Sequence: Synthetic oligonucleotide"
ggtgcatccagtttgcaaagt

SEQ ID NO: 2405 - DNA, 21 bp, Artificial Sequence
  source: /note="Description of Artificial Sequence: Synthetic oligonucleotide"
ggtgcatccagtttgcaaagt

SEQ ID NO: 2406 - DNA, 21 bp, Artificial Sequence
  source: /note="Description of Artificial Sequence: Synthetic oligonucleotide"
ggtgcatccagtttgcaaagt

SEQ ID NO: 2407 - DNA, 21 bp, Artificial Sequence
  source: /note="Description of Artificial Sequence: Synthetic oligonucleotide"
ggtgcatccagtttgcaaagt

SEQ ID NO: 2408 - DNA, 21 bp, Artificial Sequence
  source: /note="Description of Artificial Sequence: Synthetic oligonucleotide"
ggtgcatccagtttgcaaagt

SEQ ID NO: 2409 - DNA, 21 bp, Artificial Sequence
  source: /note="Description of Artificial Sequence: Synthetic oligonucleotide"
ggtgcatccagtttgcaaagt

SEQ ID NO: 2410 - DNA, 21 bp, Artificial Sequence
  source: /note="Description of Artificial Sequence: Synthetic oligonucleotide"
ggtgcatccagtttgcaaagt

SEQ ID NO: 2411 - DNA, 21 bp, Artificial Sequence
  source: /note="Description of Artificial Sequence: Synthetic oligonucleotide"
gatgcttccaatttggagcca

SEQ ID NO: 2412 - DNA, 21 bp, Artificial Sequence
  source: /note="Description of Artificial Sequence: Synthetic oligonucleotide"
gatgcttccaatttggagcca

SEQ ID NO: 2413 - DNA, 21 bp, Artificial Sequence
  source: /note="Description of Artificial Sequence: Synthetic oligonucleotide"
gatgcttccaatttggagcca

SEQ ID NO: 2414 - DNA, 21 bp, Artificial Sequence
  source: /note="Description of Artificial Sequence: Synthetic oligonucleotide"
gatgcttccaatttggagcca

SEQ ID NO: 2415 - DNA, 21 bp, Artificial Sequence
  source: /note="Description of Artificial Sequence: Synthetic oligonucleotide"
gatgcttccaatttggagcca

SEQ ID NO: 2416 - DNA, 21 bp, Artificial Sequence
  source: /note="Description of Artificial Sequence: Synthetic oligonucleotide"
gatgcttccaatttggagcca

SEQ ID NO: 2417 - DNA, 21 bp, Artificial Sequence
  source: /note="Description of Artificial Sequence: Synthetic oligonucleotide"
gatgcttccaatttggagcca

SEQ ID NO: 2418 - DNA, 21 bp, Artificial Sequence
  source: /note="Description of Artificial Sequence: Synthetic oligonucleotide"
gatgcttccaatttggagcca

SEQ ID NO: 2419 - DNA, 21 bp, Artificial Sequence
  source: /note="Description of Artificial Sequence: Synthetic oligonucleotide"
gatgcttccaatttggagcca

SEQ ID NO: 2420 - DNA, 21 bp, Artificial Sequence
  source: /note="Description of Artificial Sequence: Synthetic oligonucleotide"
gatgcttccaatttggagcca

SEQ ID NO: 2421 - DNA, 21 bp, Artificial Sequence
  source: /note="Description of Artificial Sequence: Synthetic oligonucleotide"
gatgcttccaatttggagcca

SEQ ID NO: 2422 - DNA, 21 bp, Artificial Sequence
  source: /note="Description of Artificial Sequence: Synthetic oligonucleotide"
ggtgcatccagcagggccact

SEQ ID NO: 2423 - DNA, 21 bp, Artificial Sequence
  source: /note="Description of Artificial Sequence: Synthetic oligonucleotide"
ggtgcatccagcagggccact

SEQ ID NO: 2424 - DNA, 21 bp, Artificial Sequence
  source: /note="Description of Artificial Sequence: Synthetic oligonucleotide"
ggtgcatccagcagggccact

SEQ ID NO: 2425 - DNA, 21 bp, Artificial Sequence
  source: /note="Description of Artificial Sequence: Synthetic oligonucleotide"
ggtgcatccagcagggccact

SEQ ID NO: 2426 - DNA, 21 bp, Artificial Sequence
  source: /note="Description of Artificial Sequence: Synthetic oligonucleotide"
ggtgcagccaccagggccact

SEQ ID NO: 2427 - DNA, 21 bp, Artificial Sequence
  source: /note="Description of Artificial Sequence: Synthetic oligonucleotide"
ggtgcagccaccagggccact

SEQ ID NO: 2428 - DNA, 21 bp, Artificial Sequence
  source: /note="Description of Artificial Sequence: Synthetic oligonucleotide"
ggtgcagccaccagggccact

SEQ ID NO: 2429 - DNA, 21 bp, Artificial Sequence
  source: /note="Description of Artificial Sequence: Synthetic oligonucleotide"
ggtgcagccaccagggccact

SEQ ID NO: 2430 - DNA, 21 bp, Artificial Sequence
  source: /note="Description of Artificial Sequence: Synthetic oligonucleotide"
ggtgcagccaccagggccact

SEQ ID NO: 2431 - DNA, 21 bp, Artificial Sequence
  source: /note="Description of Artificial Sequence: Synthetic oligonucleotide"
ggtgcagccaccagggccact

SEQ ID NO: 2432 - DNA, 21 bp, Artificial Sequence
  source: /note="Description of Artificial Sequence: Synthetic oligonucleotide"
ggtgcagccaccagggccact

SEQ ID NO: 2433 - DNA, 21 bp, Artificial Sequence
  source: /note="Description of Artificial Sequence: Synthetic oligonucleotide"
ggtgcagccaccagggccact

SEQ ID NO: 2434 - DNA, 21 bp, Artificial Sequence
  source: /note="Description of Artificial Sequence: Synthetic oligonucleotide"
ggtgcatccagcagggccact

SEQ ID NO: 2435 - DNA, 21 bp, Artificial Sequence
  source: /note="Description of Artificial Sequence: Synthetic oligonucleotide"
ggtgcatccagcagggccact

SEQ ID NO: 2436 - DNA, 21 bp, Artificial Sequence
  source: /note="Description of Artificial Sequence: Synthetic oligonucleotide"
ggtgcatccagcagggccact

SEQ ID NO: 2437 - DNA, 21 bp, Artificial Sequence
  source: /note="Description of Artificial Sequence: Synthetic oligonucleotide"
ggtgcatccagcagggccact

SEQ ID NO: 2438 - DNA, 21 bp, Artificial Sequence
  source: /note="Description of Artificial Sequence: Synthetic oligonucleotide"
ggtgcatccagcagggccact

SEQ ID NO: 2439 - DNA, 21 bp, Artificial Sequence
  source: /note="Description of Artificial Sequence: Synthetic oligonucleotide"
ggtgcatccagcagggccact

SEQ ID NO: 2440 - DNA, 21 bp, Artificial Sequence
  source: /note="Description of Artificial Sequence: Synthetic oligonucleotide"
ggtgcatccagcagggccact

SEQ ID NO: 2441 - DNA, 21 bp, Artificial Sequence
  source: /note="Description of Artificial Sequence: Synthetic oligonucleotide"
tgggcatctacccgggaatcc

SEQ ID NO: 2442 - DNA, 21 bp, Artificial Sequence
  source: /note="Description of Artificial Sequence: Synthetic oligonucleotide"
tgggcatctacccgggaatcc

SEQ ID NO: 2443 - DNA, 21 bp, Artificial Sequence
  source: /note="Description of Artificial Sequence: Synthetic oligonucleotide"
tgggcatctacccgggaatcc

SEQ ID NO: 2444 - DNA, 21 bp, Artificial Sequence
  source: /note="Description of Artificial Sequence: Synthetic oligonucleotide"
tgggcatctacccgggaatcc

SEQ ID NO: 2445 - DNA, 21 bp, Artificial Sequence
  source: /note="Description of Artificial Sequence: Synthetic oligonucleotide"
tgggcatctacccgggaatcc

SEQ ID NO: 2446 - DNA, 21 bp, Artificial Sequence
  source: /note="Description of Artificial Sequence: Synthetic oligonucleotide"
tgggcatctacccgggaatcc

SEQ ID NO: 2447 - DNA, 21 bp, Artificial Sequence
  source: /note="Description of Artificial Sequence: Synthetic oligonucleotide"
tgggcatctacccgggaatcc

SEQ ID NO: 2448 - DNA, 21 bp, Artificial Sequence
  source: /note="Description of Artificial Sequence: Synthetic oligonucleotide"
tgggcatctacccgggaatcc

SEQ ID NO: 2449 - DNA, 21 bp, Artificial Sequence
  source: /note="Description of Artificial Sequence: Synthetic oligonucleotide"
tgggcatctacccgggaatcc

SEQ ID NO: 2450 - DNA, 21 bp, Artificial Sequence
  source: /note="Description of Artificial Sequence: Synthetic oligonucleotide"
tgggcatctacccgggaatcc

SEQ ID NO: 2451 - DNA, 21 bp, Artificial Sequence
  source: /note="Description of Artificial Sequence: Synthetic oligonucleotide"
tgggcatctacccgggaatcc

SEQ ID NO: 2452 - DNA, 21 bp, Artificial Sequence
  source: /note="Description of Artificial Sequence: Synthetic oligonucleotide"
tggacttctacccgagaatcc

SEQ ID NO: 2453 - DNA, 21 bp, Artificial Sequence
  source: /note="Description of Artificial Sequence: Synthetic oligonucleotide"
tggacttctacccgagaatcc

SEQ ID NO: 2454 - DNA, 21 bp, Artificial Sequence
  source: /note="Description of Artificial Sequence: Synthetic oligonucleotide"
tggacttctacccgagattcc

SEQ ID NO: 2455 - DNA, 21 bp, Artificial Sequence
  source: /note="Description of Artificial Sequence: Synthetic oligonucleotide"
tggacttctacccgagaatcc

SEQ ID NO: 2456 - DNA, 21 bp, Artificial Sequence
  source: /note="Description of Artificial Sequence: Synthetic oligonucleotide"
tggacttctacccgagaatcc

SEQ ID NO: 2457 - DNA, 21 bp, Artificial Sequence
  source: /note="Description of Artificial Sequence: Synthetic oligonucleotide"
tggacttctacccgagattcc

SEQ ID NO: 2458 - DNA, 21 bp, Artificial Sequence
  source: /note="Description of Artificial Sequence: Synthetic oligonucleotide"
tggacttctacccgagattcc

SEQ ID NO: 2459 - DNA, 21 bp, Artificial Sequence
  source: /note="Description of Artificial Sequence: Synthetic oligonucleotide"
tggacttctacccgagaatcc

SEQ ID NO: 2460 - DNA, 21 bp, Artificial Sequence
  source: /note="Description of Artificial Sequence: Synthetic oligonucleotide"
tggacttctacccgagaatcc

SEQ ID NO: 2461 - DNA, 21 bp, Artificial Sequence
  source: /note="Description of Artificial Sequence: Synthetic oligonucleotide"
tgggcatctacccgggaatcc

SEQ ID NO: 2462 - DNA, 21 bp, Artificial Sequence
  source: /note="Description of Artificial Sequence: Synthetic oligonucleotide"
tgggcatctacccgggaatcc

SEQ ID NO: 2463 - DNA, 21 bp, Artificial Sequence
  source: /note="Description of Artificial Sequence: Synthetic oligonucleotide"
tgggcatctacccgggaatcc

SEQ ID NO: 2464 - DNA, 21 bp, Artificial Sequence
  source: /note="Description of Artificial Sequence: Synthetic oligonucleotide"
tgggcatctacccgggaatcc

SEQ ID NO: 2465 - DNA, 21 bp, Artificial Sequence
  source: /note="Description of Artificial Sequence: Synthetic oligonucleotide"
tgggcatctacccgggaatcc

SEQ ID NO: 2466 - DNA, 21 bp, Artificial Sequence
  source: /note="Description of Artificial Sequence: Synthetic oligonucleotide"
tggacttctacccgagattcc

SEQ ID NO: 2467 - DNA, 21 bp, Artificial Sequence
  source: /note="Description of Artificial Sequence: Synthetic oligonucleotide"
tggacttctacccgagattcc

SEQ ID NO: 2468 - DNA, 21 bp, Artificial Sequence
  source: /note="Description of Artificial Sequence: Synthetic oligonucleotide"
tggacttctacccgagattcc

SEQ ID NO: 2469 - DNA, 21 bp, Artificial Sequence
  source: /note="Description of Artificial Sequence: Synthetic oligonucleotide"
tggacttctacccgagattcc

SEQ ID NO: 2470 - DNA, 21 bp, Artificial Sequence
  source: /note="Description of Artificial Sequence: Synthetic oligonucleotide"
tggacttctacccgagattcc

SEQ ID NO: 2471 - DNA, 21 bp, Artificial Sequence
  source: /note="Description of Artificial Sequence: Synthetic oligonucleotide"
tggacttctacccgagattcc

SEQ ID NO: 2472 - DNA, 21 bp, Artificial Sequence
  source: /note="Description of Artificial Sequence: Synthetic oligonucleotide"
tggacttctacccgagattcc

SEQ ID NO: 2473 - DNA, 21 bp, Artificial Sequence
  source: /note="Description of Artificial Sequence: Synthetic oligonucleotide"
tggacttctacccgagaatcc

SEQ ID NO: 2474 - DNA, 21 bp, Artificial Sequence
  source: /note="Description of Artificial Sequence: Synthetic oligonucleotide"
tggacttctacccgagaatcc

SEQ ID NO: 2475 - DNA, 21 bp, Artificial Sequence
  source: /note="Description of Artificial Sequence: Synthetic oligonucleotide"
tggacttctacccgagaatcc

SEQ ID NO: 2476 - DNA, 21 bp, Artificial Sequence
  source: /note="Description of Artificial Sequence: Synthetic oligonucleotide"
tggacttctacccgagaatcc

SEQ ID NO: 2477 - DNA, 21 bp, Artificial Sequence
  source: /note="Description of Artificial Sequence: Synthetic oligonucleotide"
tggacttctacccgagattcc

SEQ ID NO: 2478 - DNA, 21 bp, Artificial Sequence
  source: /note="Description of Artificial Sequence: Synthetic oligonucleotide"
tggacttctacccgagaatcc

SEQ ID NO: 2479 - DNA, 21 bp, Artificial Sequence
  source: /note="Description of Artificial Sequence: Synthetic oligonucleotide"
actaataatcagcggccctca

SEQ ID NO: 2480 - DNA, 21 bp, Artificial Sequence
  source: /note="Description of Artificial Sequence: Synthetic oligonucleotide"
actaataatcagcggccctca

SEQ ID NO: 2481 - DNA, 21 bp, Artificial Sequence
  source: /note="Description of Artificial Sequence: Synthetic oligonucleotide"
actaataatcagcggccctca

SEQ ID NO: 2482 - DNA, 21 bp, Artificial Sequence
  source: /note="Description of Artificial Sequence: Synthetic oligonucleotide"
actaataatcagcggccctca

SEQ ID NO: 2483 - DNA, 21 bp, Artificial Sequence
  source: /note="Description of Artificial Sequence: Synthetic oligonucleotide"
actaataatcagcggccctca

SEQ ID NO: 2484 - DNA, 21 bp, Artificial Sequence
  source: /note="Description of Artificial Sequence: Synthetic oligonucleotide"
actaataatcagcggccctca

SEQ ID NO: 2485 - DNA, 21 bp, Artificial Sequence
  source: /note="Description of Artificial Sequence: Synthetic oligonucleotide"
actaataatcagcggccctca

SEQ ID NO: 2486 - DNA, 21 bp, Artificial Sequence
  source: /note="Description of Artificial Sequence: Synthetic oligonucleotide"
actaataatcagcggccctca

SEQ ID NO: 2487 - DNA, 21 bp, Artificial Sequence
  source: /note="Description of Artificial Sequence: Synthetic oligonucleotide"
actaataatcagcggccctca

SEQ ID NO: 2488 - DNA, 21 bp, Artificial Sequence
  source: /note="Description of Artificial Sequence: Synthetic oligonucleotide"
actaataatcagcggccctca

SEQ ID NO: 2489 - DNA, 21 bp, Artificial Sequence
  source: /note="Description of Artificial Sequence: Synthetic oligonucleotide"
actaataatcagcggccctca

SEQ ID NO: 2490 - DNA, 21 bp, Artificial Sequence
  source: /note="Description of Artificial Sequence: Synthetic oligonucleotide"
actaataatcagcggccctca

SEQ ID NO: 2491 - DNA, 21 bp, Artificial Sequence
  source: /note="Description of Artificial Sequence: Synthetic oligonucleotide"
actaataatcagcggccctca

SEQ ID NO: 2492 - DNA, 21 bp, Artificial Sequence
  source: /note="Description of Artificial Sequence: Synthetic oligonucleotide"
actaataatcagcggccctca

SEQ ID NO: 2493 - DNA, 21 bp, Artificial Sequence
  source: /note="Description of Artificial Sequence: Synthetic oligonucleotide"
ggtgcatccagtttgcaaagt

SEQ ID NO: 2494 - DNA, 21 bp, Artificial Sequence
  source: /note="Description of Artificial Sequence: Synthetic oligonucleotide"
ggtgcatccagtttgcaaagt

SEQ ID NO: 2495 - DNA, 21 bp, Artificial Sequence
  source: /note="Description of Artificial Sequence: Synthetic oligonucleotide"
actaataatcagcggccctca

SEQ ID NO: 2496 - DNA, 21 bp, Artificial Sequence
  source: /note="Description of Artificial Sequence: Synthetic oligonucleotide"
gttgcatccagtttgcaaagt

SEQ ID NO: 2497 - DNA, 21 bp, Artificial Sequence
  source: /note="Description of Artificial Sequence: Synthetic oligonucleotide"
gacaataataagcgaccctca

SEQ ID NO: 2498 - DNA, 21 bp, Artificial Sequence
  source: /note="Description of Artificial Sequence: Synthetic oligonucleotide"
gttgcatccagtttgcaaagt

SEQ ID NO: 2499 - DNA, 21 bp, Artificial Sequence
  source: /note="Description of Artificial Sequence: Synthetic oligonucleotide"
gttgcatccagtttgcaaagt

SEQ ID NO: 2500 - DNA, 21 bp, Artificial Sequence
  source: /note="Description of Artificial Sequence: Synthetic oligonucleotide"
gttgcatccagtttgcaaagt

SEQ ID NO: 2501 - DNA, 21 bp, Artificial Sequence
  source: /note="Description of Artificial Sequence: Synthetic oligonucleotide"
gttgcatccagtttgcaaagt

SEQ ID NO: 2502 - DNA, 21 bp, Artificial Sequence
  source: /note="Description of Artificial Sequence: Synthetic oligonucleotide"
gttgcatccagtttgcaaagt

SEQ ID NO: 2503 - DNA, 21 bp, Artificial Sequence
  source: /note="Description of Artificial Sequence: Synthetic oligonucleotide"
gttgcatccagtttgcaaagt

SEQ ID NO: 2504 - DNA, 21 bp, Artificial Sequence
  source: /note="Description of Artificial Sequence: Synthetic oligonucleotide"
gacaataataagcgaccctca

SEQ ID NO: 2505 - DNA, 21 bp, Artificial Sequence
  source: /note="Description of Artificial Sequence: Synthetic oligonucleotide"
gacaataataagcgaccctca

SEQ ID NO: 2506 - DNA, 21 bp, Artificial Sequence
  source: /note="Description of Artificial Sequence: Synthetic oligonucleotide"
gacaataataagcgaccctca

SEQ ID NO: 2507 - DNA, 21 bp, Artificial Sequence
  source: /note="Description of Artificial Sequence: Synthetic oligonucleotide"
gacaataataagcgaccctca

SEQ ID NO: 2508 - DNA, 21 bp, Artificial Sequence
  source: /note="Description of Artificial Sequence: Synthetic oligonucleotide"
gacaataataagcgaccctca

SEQ ID NO: 2509 - DNA, 21 bp, Artificial Sequence
  source: /note="Description of Artificial Sequence: Synthetic oligonucleotide"
gacaataataagcgaccctca

SEQ ID NO: 2510 - DNA, 21 bp, Artificial Sequence
  source: /note="Description of Artificial Sequence: Synthetic oligonucleotide"
gacaataataagcgaccctca

SEQ ID NO: 2511 - DNA, 21 bp, Artificial Sequence
  source: /note="Description of Artificial Sequence: Synthetic oligonucleotide"
gacaataataagcgaccctca

SEQ ID NO: 2512 - DNA, 21 bp, Artificial Sequence
  source: /note="Description of Artificial Sequence: Synthetic oligonucleotide"
gttgcatccagtttgcaaagt

SEQ ID NO: 2513 - DNA, 33 bp, Artificial Sequence
  source: /note="Description of Artificial Sequence: Synthetic oligonucleotide"
gcaacattcgatgacagcctgaatggtccggta

SEQ ID NO: 2514 - DNA, 27 bp, Artificial Sequence
  source: /note="Description of Artificial Sequence: Synthetic oligonucleotide"
ctacagcataataattaccccttcact

SEQ ID NO: 2515 - DNA, 27 bp, Artificial Sequence
  source: /note="Description of Artificial Sequence: Synthetic oligonucleotide"
ctacagcataataattaccccttcact

SEQ ID NO: 2516 - DNA, 24 bp, Artificial Sequence
  source: /note="Description of Artificial Sequence: Synthetic oligonucleotide"
caacagtatgatattctcctcact

SEQ ID NO: 2517 - DNA, 27 bp, Artificial Sequence
  source: /note="Description of Artificial Sequence: Synthetic oligonucleotide"
caacaatattatagtactccgtggacg

SEQ ID NO: 2518 - DNA, 27 bp, Artificial Sequence
  source: /note="Description of Artificial Sequence: Synthetic oligonucleotide"
caacaatattatagtactccgtggacg

SEQ ID NO: 2519 - DNA, 27 bp, Artificial Sequence
  source: /note="Description of Artificial Sequence: Synthetic oligonucleotide"
cagcaatattatcgtactccgtggacg

SEQ ID NO: 2520 - DNA, 27 bp, Artificial Sequence
  source: /note="Description of Artificial Sequence: Synthetic oligonucleotide"
cagcaatattatcgtactccgtggacg

SEQ ID NO: 2521 - DNA, 27 bp, Artificial Sequence
  source: /note="Description of Artificial Sequence: Synthetic oligonucleotide"
cagcagtatggtagttcaccgctcact

SEQ ID NO: 2522 - DNA, 27 bp, Artificial Sequence
  source: /note="Description of Artificial Sequence: Synthetic oligonucleotide"
cagcagtataataactggcctctcact

SEQ ID NO: 2523 - DNA, 27 bp, Artificial Sequence
  source: /note="Description of Artificial Sequence: Synthetic oligonucleotide"
ctacagcataatagttacccattcact

SEQ ID NO: 2524 - DNA, 24 bp, Artificial Sequence
  source: /note="Description of Artificial Sequence: Synthetic oligonucleotide"
caacagtatgatgatctattcact

SEQ ID NO: 2525 - DNA, 27 bp, Artificial Sequence
  source: /note="Description of Artificial Sequence: Synthetic oligonucleotide"
caacagactaacagtttccctccgacg

SEQ ID NO: 2526 - DNA, 27 bp, Artificial Sequence
  source: /note="Description of Artificial Sequence: Synthetic oligonucleotide"
caacagactaacagtttccctccgacg

SEQ ID NO: 2527 - DNA, 27 bp, Artificial Sequence
  source: /note="Description of Artificial Sequence: Synthetic oligonucleotide"
ctacagcataatagttacccattcact

SEQ ID NO: 2528 - DNA, 27 bp, Artificial Sequence
  source: /note="Description of Artificial Sequence: Synthetic oligonucleotide"
ctacagcataatagttacccattcact

SEQ ID NO: 2529 - DNA, 27 bp, Artificial Sequence
  source: /note="Description of Artificial Sequence: Synthetic oligonucleotide"
ctacagcataatagttacccattcact

SEQ ID NO: 2530 - DNA, 27 bp, Artificial Sequence
  source: /note="Description of Artificial Sequence: Synthetic oligonucleotide"
ctacagcataatagttacccattcact

SEQ ID NO: 2531 - DNA, 27 bp, Artificial Sequence
  source: /note="Description of Artificial Sequence: Synthetic oligonucleotide"
ctacagcataatagttacccattcact

SEQ ID NO: 2532 - DNA, 27 bp, Artificial Sequence
  source: /note="Description of Artificial Sequence: Synthetic oligonucleotide"
ctacagcataatagttacccattcact

SEQ ID NO: 2533 - DNA, 27 bp, Artificial Sequence
  source: /note="Description of Artificial Sequence: Synthetic oligonucleotide"
ctacagcataataattaccccttcact

SEQ ID NO: 2534 - DNA, 27 bp, Artificial Sequence
  source: /note="Description of Artificial Sequence: Synthetic oligonucleotide"
ctacagcataataattaccccttcact

SEQ ID NO: 2535 - DNA, 27 bp, Artificial Sequence
  source: /note="Description of Artificial Sequence: Synthetic oligonucleotide"
ctacagcataataattaccccttcact

SEQ ID NO: 2536 - DNA, 27 bp, Artificial Sequence
  source: /note="Description of Artificial Sequence: Synthetic oligonucleotide"
ctacagcataataattaccccttcact

SEQ ID NO: 2537 - DNA, 27 bp, Artificial Sequence
  source: /note="Description of Artificial Sequence: Synthetic oligonucleotide"
ctacagcataataattaccccttcact

SEQ ID NO: 2538 - DNA, 27 bp, Artificial Sequence
  source: /note="Description of Artificial Sequence: Synthetic oligonucleotide"
ctacagcataataattaccccttcact

SEQ ID NO: 2539 - DNA, 27 bp, Artificial Sequence
  source: /note="Description of Artificial Sequence: Synthetic oligonucleotide"
ctacagcataataattaccccttcact

SEQ ID NO: 2540 - DNA, 27 bp, Artificial Sequence
  source: /note="Description of Artificial Sequence: Synthetic oligonucleotide"
ctacagcataataattaccccttcact

SEQ ID NO: 2541 - DNA, 27 bp, Artificial Sequence
  source: /note="Description of Artificial Sequence: Synthetic oligonucleotide"
ctacagcataataattaccccttcact

SEQ ID NO: 2542 - DNA, 27 bp, Artificial Sequence
  source: /note="Description of Artificial Sequence: Synthetic oligonucleotide"
ctacagcataataattaccccttcact

SEQ ID NO: 2543 - DNA, 27 bp, Artificial Sequence
  source: /note="Description of Artificial Sequence: Synthetic oligonucleotide"
ctacagcataataattaccccttcact

SEQ ID NO: 2544 - DNA, 27 bp, Artificial Sequence
  source: /note="Description of Artificial Sequence: Synthetic oligonucleotide"
ctacagcataataattaccccttcact

SEQ ID NO: 2545 - DNA, 27 bp, Artificial Sequence
  source: /note="Description of Artificial Sequence: Synthetic oligonucleotide"
ctacagcataataattaccccttcact

SEQ ID NO: 2546 - DNA, 27 bp, Artificial Sequence
  source: /note="Description of Artificial Sequence: Synthetic oligonucleotide"
ctacagcataataattaccccttcact

SEQ ID NO: 2547 - DNA, 27 bp, Artificial Sequence
  source: /note="Description of Artificial Sequence: Synthetic oligonucleotide"
ctacagcataataattaccccttcact

SEQ ID NO: 2548 - DNA, 27 bp, Artificial Sequence
  source: /note="Description of Artificial Sequence: Synthetic oligonucleotide"
ctacagcataataattaccccttcact

SEQ ID NO: 2549 - DNA, 27 bp, Artificial Sequence
  source: /note="Description of Artificial Sequence: Synthetic oligonucleotide"
ctacagcataataattaccccttcact

SEQ ID NO: 2550 - DNA, 27 bp, Artificial Sequence
  source: /note="Description of Artificial Sequence: Synthetic oligonucleotide"
ctacagcataataattaccccttcact

SEQ ID NO: 2551 - DNA, 27 bp, Artificial Sequence
  source: /note="Description of Artificial Sequence: Synthetic oligonucleotide"
ctacagcataataattaccccttcact

SEQ ID NO: 2552 - DNA, 24 bp, Artificial Sequence
  source: /note="Description of Artificial Sequence: Synthetic oligonucleotide"
caacagtatgatattctcctcact

SEQ ID NO: 2553 - DNA, 24 bp, Artificial Sequence
  source: /note="Description of Artificial Sequence: Synthetic oligonucleotide"
caacagtatgatattctcctcact

SEQ ID NO: 2554 - DNA, 24 bp, Artificial Sequence
  source: /note="Description of Artificial Sequence: Synthetic oligonucleotide"
caacagtatgatattctcctcact

SEQ ID NO: 2555 - DNA, 24 bp, Artificial Sequence
  source: /note="Description of Artificial Sequence: Synthetic oligonucleotide"
caacagtatgatattctcctcact

SEQ ID NO: 2556 - DNA, 24 bp, Artificial Sequence
  source: /note="Description of Artificial Sequence: Synthetic oligonucleotide"
caacagtatgatattctcctcact

SEQ ID NO: 2557 - DNA, 24 bp, Artificial Sequence
  source: /note="Description of Artificial Sequence: Synthetic oligonucleotide"
caacagtatgatattctcctcact

SEQ ID NO: 2558 - DNA, 24 bp, Artificial Sequence
  source: /note="Description of Artificial Sequence: Synthetic oligonucleotide"
caacagtatgatattctcctcact

SEQ ID NO: 2559 - DNA, 24 bp, Artificial Sequence
  source: /note="Description of Artificial Sequence: Synthetic oligonucleotide"
caacagtatgatattctcctcact

SEQ ID NO: 2560 - DNA, 24 bp, Artificial Sequence
  source: /note="Description of Artificial Sequence: Synthetic oligonucleotide"
caacagtatgatattctcctcact

SEQ ID NO: 2561 - DNA, 27 bp, Artificial Sequence
  source: /note="Description of Artificial Sequence: Synthetic oligonucleotide"
ctacagcataataattaccccttcact

SEQ ID NO: 2562 - DNA, 27 bp, Artificial Sequence
  source: /note="Description of Artificial Sequence: Synthetic oligonucleotide"
ctacagcataataattaccccttcact

SEQ ID NO: 2563 - DNA, 27 bp, Artificial Sequence
  source: /note="Description of Artificial Sequence: Synthetic oligonucleotide"
ctacagcataataattaccccttcact

SEQ ID NO: 2564 - DNA, 27 bp, Artificial Sequence
  source: /note="Description of Artificial Sequence: Synthetic oligonucleotide"
ctacagcataataattaccccttcact

SEQ ID NO: 2565 - DNA, 27 bp, Artificial Sequence
  source: /note="Description of Artificial Sequence: Synthetic oligonucleotide"
ctacagcataataattaccccttcact

SEQ ID NO: 2566 - DNA, 27 bp, Artificial Sequence
  source: /note="Description of Artificial Sequence: Synthetic oligonucleotide"
ctacagcataataattaccccttcact

SEQ ID NO: 2567 - DNA, 27 bp, Artificial Sequence
  source: /note="Description of Artificial Sequence: Synthetic oligonucleotide"
ctacagcataataattaccccttcact

SEQ ID NO: 2568 - DNA, 24 bp, Artificial Sequence
  source: /note="Description of Artificial Sequence: Synthetic oligonucleotide"
caacagtatgatgatctattcact

SEQ ID NO: 2569 - DNA, 24 bp, Artificial Sequence
  source: /note="Description of Artificial Sequence: Synthetic oligonucleotide"
caacagtatgatgatctattcact

SEQ ID NO: 2570 - DNA, 24 bp, Artificial Sequence
  source: /note="Description of Artificial Sequence: Synthetic oligonucleotide"
caacagtatgatgatctattcact

SEQ ID NO: 2571 - DNA, 24 bp, Artificial Sequence
  source: /note="Description of Artificial Sequence: Synthetic oligonucleotide"
caacagtatgatgatctattcact

SEQ ID NO: 2572 - DNA, 24 bp, Artificial Sequence
  source: /note="Description of Artificial Sequence: Synthetic oligonucleotide"
caacagtatgatgatctattcact

SEQ ID NO: 2573 - DNA, 24 bp, Artificial Sequence
  source: /note="Description of Artificial Sequence: Synthetic oligonucleotide"
caacagtatgatgatctattcact

SEQ ID NO: 2574 - DNA, 24 bp, Artificial Sequence
  source: /note="Description of Artificial Sequence: Synthetic oligonucleotide"
caacagtatgatgatctattcact

SEQ ID NO: 2575 - DNA, 24 bp, Artificial Sequence
  source: /note="Description of Artificial Sequence: Synthetic oligonucleotide"
caacagtatgatgatctattcact

SEQ ID NO: 2576 - DNA, 24 bp, Artificial Sequence
  source: /note="Description of Artificial Sequence: Synthetic oligonucleotide"
caacagtatgatgatctattcact

SEQ ID NO: 2577 - DNA, 24 bp, Artificial Sequence
  source: /note="Description of Artificial Sequence: Synthetic oligonucleotide"
caacagtatgatgatctattcact

SEQ ID NO: 2578 - DNA, 24 bp, Artificial Sequence
  source: /note="Description of Artificial Sequence: Synthetic oligonucleotide"
caacagtatgatgatctattcact

SEQ ID NO: 2579 - DNA, 24 bp, Artificial Sequence
  source: /note="Description of Artificial Sequence: Synthetic oligonucleotide"
cagcagtatggtagctcacctcgc

SEQ ID NO: 2580 - DNA, 24 bp, Artificial Sequence
  source: /note="Description of Artificial Sequence: Synthetic oligonucleotide"
cagcagtatggtagctcacctcgc

SEQ ID NO: 2581 - DNA, 24 bp, Artificial Sequence
  source: /note="Description of Artificial Sequence: Synthetic oligonucleotide"
cagcagtatggtagctcacctcgc

SEQ ID NO: 2582 - DNA, 24 bp, Artificial Sequence
  source: /note="Description of Artificial Sequence: Synthetic oligonucleotide"
cagcagtatggtagctcacctcgc

SEQ ID NO: 2583 - DNA, 27 bp, Artificial Sequence
  source: /note="Description of Artificial Sequence: Synthetic oligonucleotide"
cagcagtataataactggcctctcact

SEQ ID NO: 2584 - DNA, 27 bp, Artificial Sequence
  source: /note="Description of Artificial Sequence: Synthetic oligonucleotide"
cagcagtataataactggcctctcact

SEQ ID NO: 2585 - DNA, 27 bp, Artificial Sequence
  source: /note="Description of Artificial Sequence: Synthetic oligonucleotide"
cagcagtataataactggcctctcact

SEQ ID NO: 2586 - DNA, 27 bp, Artificial Sequence
  source: /note="Description of Artificial Sequence: Synthetic oligonucleotide"
cagcagtataataactggcctctcact

SEQ ID NO: 2587 - DNA, 27 bp, Artificial Sequence
  source: /note="Description of Artificial Sequence: Synthetic oligonucleotide"
cagcagtataataacttccctctcact

SEQ ID NO: 2588 - DNA, 27 bp, Artificial Sequence
  source: /note="Description of Artificial Sequence: Synthetic oligonucleotide"
cagcagtataataactatcctctcact

SEQ ID NO: 2589 - DNA, 27 bp, Artificial Sequence
  source: /note="Description of Artificial Sequence: Synthetic oligonucleotide"
cagcagtataataactggcctctcact

SEQ ID NO: 2590 - DNA, 27 bp, Artificial Sequence
  source: /note="Description of Artificial Sequence: Synthetic oligonucleotide"
cagcagtataataactggcctctcact

SEQ ID NO: 2591 - DNA, 27 bp, Artificial Sequence
  source: /note="Description of Artificial Sequence: Synthetic oligonucleotide"
cagcagtatggtagttcaccgctcact

SEQ ID NO: 2592 - DNA, 27 bp, Artificial Sequence
  source: /note="Description of Artificial Sequence: Synthetic oligonucleotide"
cagcagtatggtagttcaccgctcact

SEQ ID NO: 2593 - DNA, 27 bp, Artificial Sequence
  source: /note="Description of Artificial Sequence: Synthetic oligonucleotide"
cagcagtatggtagttcaccgctcact

SEQ ID NO: 2594 - DNA, 27 bp, Artificial Sequence
  source: /note="Description of Artificial Sequence: Synthetic oligonucleotide"
cagcagtatggtagttcaccgctcact

SEQ ID NO: 2595 - DNA, 27 bp, Artificial Sequence
  source: /note="Description of Artificial Sequence: Synthetic oligonucleotide"
cagcagtatggtagttcaccgctcact

SEQ ID NO: 2596 - DNA, 27 bp, Artificial Sequence
  source: /note="Description of Artificial Sequence: Synthetic oligonucleotide"
cagcagtatggtagttcaccgctcact

SEQ ID NO: 2597 - DNA, 27 bp, Artificial Sequence
  source: /note="Description of Artificial Sequence: Synthetic oligonucleotide"
cagcagtatggtagttcaccgctcact

SEQ ID NO: 2598 - DNA, 27 bp, Artificial Sequence
  source: /note="Description of Artificial Sequence: Synthetic oligonucleotide"
caacaatattatagtactccgtggacg

SEQ ID NO: 2599 - DNA, 27 bp, Artificial Sequence
  source: /note="Description of Artificial Sequence: Synthetic oligonucleotide"
caacaatattatagtactccgtggacg

SEQ ID NO: 2600 - DNA, 27 bp, Artificial Sequence
  source: /note="Description of Artificial Sequence: Synthetic oligonucleotide"
caacaatattatagtactccgtggacg

SEQ ID NO: 2601 - DNA, 27 bp, Artificial Sequence
  source: /note="Description of Artificial Sequence: Synthetic oligonucleotide"
caacaatattatagtactccgtggacg

SEQ ID NO: 2602 - DNA, 27 bp, Artificial Sequence
  source: /note="Description of Artificial Sequence: Synthetic oligonucleotide"
caacaatattatagtactccgtggacg

SEQ ID NO: 2603 - DNA, 27 bp, Artificial Sequence
  source: /note="Description of Artificial Sequence: Synthetic oligonucleotide"
caacaatattatagtactccgtggacg

SEQ ID NO: 2604 - DNA, 27 bp, Artificial Sequence
  source: /note="Description of Artificial Sequence: Synthetic oligonucleotide"
caacaatattatagtactccgtggacg

SEQ ID NO: 2605 - DNA, 27 bp, Artificial Sequence
  source: /note="Description of Artificial Sequence: Synthetic oligonucleotide"
caacaatattatagtactccgtggacg

SEQ ID NO: 2606 - DNA, 27 bp, Artificial Sequence
  source: /note="Description of Artificial Sequence: Synthetic oligonucleotide"
caacaatattatagtactccgtggacg

SEQ ID NO: 2607 - DNA, 27 bp, Artificial Sequence
  source: /note="Description of Artificial Sequence: Synthetic oligonucleotide"
caacaatattatagtactccgtggacg

SEQ ID NO: 2608 - DNA, 27 bp, Artificial Sequence
  source: /note="Description of Artificial Sequence: Synthetic oligonucleotide"
caacaatattatagtactccgtggacg

SEQ ID NO: 2609 - DNA, 27 bp, Artificial Sequence
  source: /note="Description of Artificial Sequence: Synthetic oligonucleotide"
cagcaatattatcgtactccgtggacg

SEQ ID NO: 2610 - DNA, 27 bp, Artificial Sequence
  source: /note="Description of Artificial Sequence: Synthetic oligonucleotide"
cagcaatattatcgtactccgtggacg

SEQ ID NO: 2611 - DNA, 27 bp, Artificial Sequence
  source: /note="Description of Artificial Sequence: Synthetic oligonucleotide"
cagcaatattatcgtactccgtggacg

SEQ ID NO: 2612 - DNA, 27 bp, Artificial Sequence
  source: /note="Description of Artificial Sequence: Synthetic oligonucleotide"
cagcaatattatcgtactccgtggacg

SEQ ID NO: 2613 - DNA, 27 bp, Artificial Sequence
  source: /note="Description of Artificial Sequence: Synthetic oligonucleotide"
cagcaatattatcgtactccgtggacg

SEQ ID NO: 2614 - DNA, 27 bp, Artificial Sequence
  source: /note="Description of Artificial Sequence: Synthetic oligonucleotide"
cagcaatattatcgtactccgtggacg

SEQ ID NO: 2615 - DNA, 27 bp, Artificial Sequence
  source: /note="Description of Artificial Sequence: Synthetic oligonucleotide"
cagcaatattatcgtactccgtggacg

SEQ ID NO: 2616 - DNA, 27 bp, Artificial Sequence
  source: /note="Description of Artificial Sequence: Synthetic oligonucleotide"
cagcaatattatcgtactccgtggacg

SEQ ID NO: 2617 - DNA, 27 bp, Artificial Sequence
  source: /note="Description of Artificial Sequence: Synthetic oligonucleotide"
cagcaatattatcgtactccgtggacg

SEQ ID NO: 2618 - DNA, 27 bp, Artificial Sequence
  source: /note="Description of Artificial Sequence: Synthetic oligonucleotide"
caacaatattatagtactccgtggacg

SEQ ID NO: 2619 - DNA, 27 bp, Artificial Sequence
  source: /note="Description of Artificial Sequence: Synthetic oligonucleotide"
caacaatattatagtactccgtggacg

SEQ ID NO: 2620 - DNA, 27 bp, Artificial Sequence
  source: /note="Description of Artificial Sequence: Synthetic oligonucleotide"
caacaatattatagtactccgtggacg

SEQ ID NO: 2621 - DNA, 27 bp, Artificial Sequence
  source: /note="Description of Artificial Sequence: Synthetic oligonucleotide"
caacaatattatagtactccgtggacg

SEQ ID NO: 2622 - DNA, 27 bp, Artificial Sequence
  source: /note="Description of Artificial Sequence: Synthetic oligonucleotide"
caacaatattatagtactccgtggacg

SEQ ID NO: 2623 - DNA, 27 bp, Artificial Sequence
  source: /note="Description of Artificial Sequence: Synthetic oligonucleotide"
cagcaatattatcgtactccgtggacg

SEQ ID NO: 2624 - DNA, 27 bp, Artificial Sequence
  source: /note="Description of Artificial Sequence: Synthetic oligonucleotide"
cagcaatattatcgtactccgtggacg

SEQ ID NO: 2625 - DNA, 27 bp, Artificial Sequence
  source: /note="Description of Artificial Sequence: Synthetic oligonucleotide"
cagcaatattatcgtactccgtggacg

SEQ ID NO: 2626 - DNA, 27 bp, Artificial Sequence
  source: /note="Description of Artificial Sequence: Synthetic oligonucleotide"
cagcaatattatcgtactccgtggacg

SEQ ID NO: 2627 - DNA, 27 bp, Artificial Sequence
  source: /note="Description of Artificial Sequence: Synthetic oligonucleotide"
cagcaatattatcgtactccgtggacg

SEQ ID NO: 2628 - DNA, 27 bp, Artificial Sequence
  source: /note="Description of Artificial Sequence: Synthetic oligonucleotide"
cagcaatattatcgtactccgtggacg

SEQ ID NO: 2629 - DNA, 27 bp, Artificial Sequence
  source: /note="Description of Artificial Sequence: Synthetic oligonucleotide"
cagcaatattatcgtactccgtggacg

SEQ ID NO: 2630 - DNA, 27 bp, Artificial Sequence
  source: /note="Description of Artificial Sequence: Synthetic oligonucleotide"
cagcaatattatcgtactccgtggacg

SEQ ID NO: 2631 - DNA, 27 bp, Artificial Sequence
  source: /note="Description of Artificial Sequence: Synthetic oligonucleotide"
cagcaatattatcgtactccgtggacg

SEQ ID NO: 2632 - DNA, 27 bp, Artificial Sequence
  source: /note="Description of Artificial Sequence: Synthetic oligonucleotide"
cagcaatattatcgtactccgtggacg

SEQ ID NO: 2633 - DNA, 27 bp, Artificial Sequence
  source: /note="Description of Artificial Sequence: Synthetic oligonucleotide"
cagcaatattatcgtactccgtggacg

SEQ ID NO: 2634 - DNA, 27 bp, Artificial Sequence
  source: /note="Description of Artificial Sequence: Synthetic oligonucleotide"
cagcaatattatcgtactccgtggacg

SEQ ID NO: 2635 - DNA, 27 bp, Artificial Sequence
  source: /note="Description of Artificial Sequence: Synthetic oligonucleotide"
cagcaatattatcgtactccgtggacg

SEQ ID NO: 2636 - DNA, 33 bp, Artificial Sequence
  source: /note="Description of Artificial Sequence: Synthetic oligonucleotide"
gcaacattcgatgaaagcctgagtggtccggta

SEQ ID NO: 2637 - DNA, 33 bp, Artificial Sequence
  source: /note="Description of Artificial Sequence: Synthetic oligonucleotide"
gcaacattcgatgaaagcctgcaaggtccggta

SEQ ID NO: 2638 - DNA, 33 bp, Artificial Sequence; identical to SEQ ID NO: 2636
  source: /note="Description of Artificial Sequence: Synthetic oligonucleotide"

SEQ ID NO: 2639 - DNA, 33 bp, Artificial Sequence; identical to SEQ ID NO: 2637
  source: /note="Description of Artificial Sequence: Synthetic oligonucleotide"

SEQ ID NO: 2640 - DNA, 33 bp, Artificial Sequence; identical to SEQ ID NO: 2513
  source: /note="Description of Artificial Sequence: Synthetic oligonucleotide"

SEQ ID NO: 2641 - DNA, 33 bp, Artificial Sequence; identical to SEQ ID NO: 2513
  source: /note="Description of Artificial Sequence: Synthetic oligonucleotide"

SEQ ID NO: 2642 - DNA, 33 bp, Artificial Sequence
  source: /note="Description of Artificial Sequence: Synthetic oligonucleotide"
gcaacattcgatgaaagcctgaatggtccggta

SEQ ID NO: 2643 - DNA, 33 bp, Artificial Sequence
  source: /note="Description of Artificial Sequence: Synthetic oligonucleotide"
gcaacattcgatgacagcctgcaaggtccggta

SEQ ID NO: 2644 - DNA, 33 bp, Artificial Sequence
  source: /note="Description of Artificial Sequence: Synthetic oligonucleotide"
gcaacattcgatgacagcctgagtggtccggta

SEQ ID NO: 2645 - DNA, 33 bp, Artificial Sequence
  source: /note="Description of Artificial Sequence: Synthetic oligonucleotide"
gcaacattcgatgacagcctgaatgctccggta

SEQ ID NO: 2646 - DNA, 33 bp, Artificial Sequence
  source: /note="Description of Artificial Sequence: Synthetic oligonucleotide"
gcaacattcgatagcagcctgaatggtccggta

SEQ ID NO: 2647 - DNA, 33 bp, Artificial Sequence
  source: /note="Description of Artificial Sequence: Synthetic oligonucleotide"
gcaacattcgatagcagcctgaatgctccggta

SEQ ID NO: 2648 - DNA, 33 bp, Artificial Sequence; identical to SEQ ID NO: 2647
  source: /note="Description of Artificial Sequence: Synthetic oligonucleotide"

SEQ ID NO: 2649 - DNA, 33 bp, Artificial Sequence; identical to SEQ ID NO: 2636
  source: /note="Description of Artificial Sequence: Synthetic oligonucleotide"

SEQ ID NO: 2650 - DNA, 27 bp, Artificial Sequence
  source: /note="Description of Artificial Sequence: Synthetic oligonucleotide"
ctacagcataataattaccccttcact

SEQ ID NO: 2651 - DNA, 27 bp, Artificial Sequence
  source: /note="Description of Artificial Sequence: Synthetic oligonucleotide"
ctacagcataataattaccccttcact

SEQ ID NO: 2652 - DNA, 33 bp, Artificial Sequence
  source: /note="Description of Artificial Sequence: Synthetic oligonucleotide"
gcaacattcgatagcagcctgagtggtccggta

SEQ ID NO: 2653 - DNA, 27 bp, Artificial Sequence
  source: /note="Description of Artificial Sequence: Synthetic oligonucleotide"
caacagagttacagtaccctgatcagt

SEQ ID NO: 2654 - DNA, 33 bp, Artificial Sequence
  source: /note="Description of Artificial Sequence: Synthetic oligonucleotide"
ggaacatgggatagcagcctgagtgctgtggta

SEQ ID NO: 2655 - DNA, 27 bp, Artificial Sequence
  source: /note="Description of Artificial Sequence: Synthetic oligonucleotide"
caacagagttacagtaccctgatcagt

SEQ ID NO: 2656 - DNA, 27 bp, Artificial Sequence
  source: /note="Description of Artificial Sequence: Synthetic oligonucleotide"
caacagagttacagtaccctgatcagt

SEQ ID NO: 2657 - DNA, 27 bp, Artificial Sequence
  source: /note="Description of Artificial Sequence: Synthetic oligonucleotide"
caacagagttacagtaccctgatcagt

SEQ ID NO: 2658 - DNA, 27 bp, Artificial Sequence
  source: /note="Description of Artificial Sequence: Synthetic oligonucleotide"
caacagagttacagtaccctgatcagt

SEQ ID NO: 2659 - DNA, 27 bp, Artificial Sequence
  source: /note="Description of Artificial Sequence: Synthetic oligonucleotide"
caacagagttacagtaccctgatcagt

SEQ ID NO: 2660 - DNA, 27 bp, Artificial Sequence
  source: /note="Description of Artificial Sequence: Synthetic oligonucleotide"
caacagagttacagtaccctgatcagt

SEQ ID NO: 2661 - DNA, 33 bp, Artificial Sequence; identical to SEQ ID NO: 2654
  source: /note="Description of Artificial Sequence: Synthetic oligonucleotide"

SEQ ID NO: 2662 - DNA, 33 bp, Artificial Sequence; identical to SEQ ID NO: 2654
  source: /note="Description of Artificial Sequence: Synthetic oligonucleotide"

SEQ ID NO: 2663 - DNA, 33 bp, Artificial Sequence; identical to SEQ ID NO: 2654
  source: /note="Description of Artificial Sequence: Synthetic oligonucleotide"

SEQ ID NO: 2664 - DNA, 33 bp, Artificial Sequence
  source: /note="Description of Artificial Sequence: Synthetic oligonucleotide"
ggaacattcgaaagcagcctgagtgctgtggta

SEQ ID NO: 2665 - DNA, 33 bp, Artificial Sequence; identical to SEQ ID NO: 2654
  source: /note="Description of Artificial Sequence: Synthetic oligonucleotide"

SEQ ID NO: 2666 - DNA, 33 bp, Artificial Sequence; identical to SEQ ID NO: 2654
  source: /note="Description of Artificial Sequence: Synthetic oligonucleotide"

SEQ ID NO: 2667 - DNA, 33 bp, Artificial Sequence; identical to SEQ ID NO: 2654
  source: /note="Description of Artificial Sequence: Synthetic oligonucleotide"

SEQ ID NO: 2668 - DNA, 33 bp, Artificial Sequence; identical to SEQ ID NO: 2664
  source: /note="Description of Artificial Sequence: Synthetic oligonucleotide"

SEQ ID NO: 2669 - DNA, 27 bp, Artificial Sequence
  source: /note="Description of Artificial Sequence: Synthetic oligonucleotide"
caacagagttacagtaccctgctcagt

SEQ ID NO: 2670 - DNA, 15 bp, Artificial Sequence
  source: /note="Description of Artificial Sequence: Synthetic oligonucleotide"
ggctactatatgcat

SEQ ID NO: 2671 - DNA, 15 bp, Artificial Sequence
  source: /note="Description of Artificial Sequence: Synthetic oligonucleotide"
aactttggcatgcac

SEQ ID NO: 2672 - DNA, 15 bp, Artificial Sequence
  source: /note="Description of Artificial Sequence: Synthetic oligonucleotide"
tactttggcatgcac

SEQ ID NO: 2673 - DNA, 15 bp, Artificial Sequence
  source: /note="Description of Artificial Sequence: Synthetic oligonucleotide"
agctatggcatgcac

SEQ ID NO: 2674 - DNA, 15 bp, Artificial Sequence
  source: /note="Description of Artificial Sequence: Synthetic oligonucleotide"
ggctactatatccac

SEQ ID NO: 2675 - DNA, 15 bp, Artificial Sequence
  source: /note="Description of Artificial Sequence: Synthetic oligonucleotide"
ggctactatatccac

SEQ ID NO: 2676 - DNA, 15 bp, Artificial Sequence
  source: /note="Description of Artificial Sequence: Synthetic oligonucleotide"
ggctactatatacac

SEQ ID NO: 2677 - DNA, 15 bp, Artificial Sequence
  source: /note="Description of Artificial Sequence: Synthetic oligonucleotide"
ggctactatatacac

SEQ ID NO: 2678 - DNA, 21 bp, Artificial Sequence
  source: /note="Description of Artificial Sequence: Synthetic oligonucleotide"
agtggtggttactactggagc

SEQ ID NO: 2679 - DNA, 15 bp, Artificial Sequence
  source: /note="Description of Artificial Sequence: Synthetic oligonucleotide"
aactatggcatgcac

SEQ ID NO: 2680 - DNA, 15 bp, Artificial Sequence
  source: /note="Description of Artificial Sequence: Synthetic oligonucleotide"
tactttggcatgcac

SEQ ID NO: 2681 - DNA, 15 bp, Artificial Sequence
  source: /note="Description of Artificial Sequence: Synthetic oligonucleotide"
agctatggcatgcac

SEQ ID NO: 2682 - DNA, 15 bp, Artificial Sequence
  source: /note="Description of Artificial Sequence: Synthetic oligonucleotide"
agttactactggagc

SEQ ID NO: 2683 - DNA, 15 bp, Artificial Sequence
  source: /note="Description of Artificial Sequence: Synthetic oligonucleotide"
agttactactggagc

SEQ ID NO: 2684 - DNA, 15 bp, Artificial Sequence
  source: /note="Description of Artificial Sequence: Synthetic oligonucleotide"
tactttggcatgcac

SEQ ID NO: 2685 - DNA, 15 bp, Artificial Sequence
  source: /note="Description of Artificial Sequence: Synthetic oligonucleotide"
tactttggcatgcac

SEQ ID NO: 2686 - DNA, 15 bp, Artificial Sequence
  source: /note="Description of Artificial Sequence: Synthetic oligonucleotide"
tactttggcatgcac

SEQ ID NO: 2687 - DNA, 15 bp, Artificial Sequence
  source: /note="Description of Artificial Sequence: Synthetic oligonucleotide"
tactttggcatgcac

SEQ ID NO: 2688 - DNA, 15 bp, Artificial Sequence
  source: /note="Description of Artificial Sequence: Synthetic oligonucleotide"
tactttggcatgcac

SEQ ID NO: 2689 - DNA, 15 bp, Artificial Sequence
  source: /note="Description of Artificial Sequence: Synthetic oligonucleotide"
tactttggcatgcac

SEQ ID NO: 2690 - DNA, 15 bp, Artificial Sequence
  source: /note="Description of Artificial Sequence: Synthetic oligonucleotide"
aactttggcatgcac

SEQ ID NO: 2691 - DNA, 15 bp, Artificial Sequence
  source: /note="Description of Artificial Sequence: Synthetic oligonucleotide"
aactttggcatgcac

SEQ ID NO: 2692 - DNA, 15 bp, Artificial Sequence
  source: /note="Description of Artificial Sequence: Synthetic oligonucleotide"
aactttggcatgcac

SEQ ID NO: 2693 - DNA, 15 bp, Artificial Sequence
  source: /note="Description of Artificial Sequence: Synthetic oligonucleotide"
aactttggcatgcac

SEQ ID NO: 2694 - DNA, 15 bp, Artificial Sequence
  source: /note="Description of Artificial Sequence: Synthetic oligonucleotide"
aactttggcatgcac

SEQ ID NO: 2695 - DNA, 15 bp, Artificial Sequence
  source: /note="Description of Artificial Sequence: Synthetic oligonucleotide"
aactttggcatgcac

SEQ ID NO: 2696 - DNA, 15 bp, Artificial Sequence
  source: /note="Description of Artificial Sequence: Synthetic oligonucleotide"
aactttggcatgcac

SEQ ID NO: 2697 - DNA, 15 bp, Artificial Sequence
  source: /note="Description of Artificial Sequence: Synthetic oligonucleotide"
aactttggcatgcac

SEQ ID NO: 2698 - DNA, 15 bp, Artificial Sequence
  source: /note="Description of Artificial Sequence: Synthetic oligonucleotide"
aactttggcatgcac

SEQ ID NO: 2699 - DNA, 15 bp, Artificial Sequence
  source: /note="Description of Artificial Sequence: Synthetic oligonucleotide"
aactttggcatgcac

SEQ ID NO: 2700 - DNA, 15 bp, Artificial Sequence
  source: /note="Description of Artificial Sequence: Synthetic oligonucleotide"
aactttggcatgcac

SEQ ID NO: 2701 - DNA, 15 bp, Artificial Sequence
  source: /note="Description of Artificial Sequence: Synthetic oligonucleotide"
aactttggcatgcac

SEQ ID NO: 2702 - DNA, 15 bp, Artificial Sequence
  source: /note="Description of Artificial Sequence: Synthetic oligonucleotide"
aactttggcatgcac

SEQ ID NO: 2703 - DNA, 15 bp, Artificial Sequence
  source: /note="Description of Artificial Sequence: Synthetic oligonucleotide"
aactttggcatgcac

SEQ ID NO: 2704 - DNA, 15 bp, Artificial Sequence
  source: /note="Description of Artificial Sequence: Synthetic oligonucleotide"
aactttggcatgcac

SEQ ID NO: 2705 - DNA, 15 bp, Artificial Sequence
  source: /note="Description of Artificial Sequence: Synthetic oligonucleotide"
aactttggcatgcac

SEQ ID NO: 2706 - DNA, 15 bp, Artificial Sequence
  source: /note="Description of Artificial Sequence: Synthetic oligonucleotide"
aactttggcatgcac

SEQ ID NO: 2707 - DNA, 15 bp, Artificial Sequence
  source: /note="Description of Artificial Sequence: Synthetic oligonucleotide"
aactttggcatgcac

SEQ ID NO: 2708 - DNA, 15 bp, Artificial Sequence
  source: /note="Description of Artificial Sequence: Synthetic oligonucleotide"
aactttggcatgcac

SEQ ID NO: 2709 - DNA, 15 bp, Artificial Sequence
  source: /note="Description of Artificial Sequence: Synthetic oligonucleotide"
agctatggcatgcac

SEQ ID NO: 2710 - DNA, 15 bp, Artificial Sequence
  source: /note="Description of Artificial Sequence: Synthetic oligonucleotide"
agctatggcatgcac

SEQ ID NO: 2711 - DNA, 15 bp, Artificial Sequence
  source: /note="Description of Artificial Sequence: Synthetic oligonucleotide"
agctatggcatgcac

SEQ ID NO: 2712 - DNA, 15 bp, Artificial Sequence
  source: /note="Description of Artificial Sequence: Synthetic oligonucleotide"
agctatggcatgcac

SEQ ID NO: 2713 - DNA, 15 bp, Artificial Sequence
  source: /note="Description of Artificial Sequence: Synthetic oligonucleotide"
agctatggcatgcac

SEQ ID NO: 2714 - DNA, 15 bp, Artificial Sequence
  source: /note="Description of Artificial Sequence: Synthetic oligonucleotide"
agctatggcatgcac

SEQ ID NO: 2715 - DNA, 15 bp, Artificial Sequence
  source: /note="Description of Artificial Sequence: Synthetic oligonucleotide"
agctatggcatgcac

SEQ ID NO: 2716 - DNA, 15 bp, Artificial Sequence
  source: /note="Description of Artificial Sequence: Synthetic oligonucleotide"
agctatggcatgcac

SEQ ID NO: 2717 - DNA, 15 bp, Artificial Sequence
  source: /note="Description of Artificial Sequence: Synthetic oligonucleotide"
agctatggcatgcac

SEQ ID NO: 2718 - DNA, 15 bp, Artificial Sequence
  source: /note="Description of Artificial Sequence: Synthetic oligonucleotide"
tactttggcatgcac

SEQ ID NO: 2719 - DNA, 15 bp, Artificial Sequence
  source: /note="Description of Artificial Sequence: Synthetic oligonucleotide"
tactttggcatgcac

SEQ ID NO: 2720 - DNA, 15 bp, Artificial Sequence
  source: /note="Description of Artificial Sequence: Synthetic oligonucleotide"
tactttggcatgcac

SEQ ID NO: 2721 - DNA, 15 bp, Artificial Sequence
  source: /note="Description of Artificial Sequence: Synthetic oligonucleotide"
tactttggcatgcac

SEQ ID NO: 2722 - DNA, 15 bp, Artificial Sequence
  source: /note="Description of Artificial Sequence: Synthetic oligonucleotide"
tactttggcatgcac

SEQ ID NO: 2723 - DNA, 15 bp, Artificial Sequence
  source: /note="Description of Artificial Sequence: Synthetic oligonucleotide"
tactttggcatgcac

SEQ ID NO: 2724 - DNA, 15 bp, Artificial Sequence
  source: /note="Description of Artificial Sequence: Synthetic oligonucleotide"
tactttggcatgcac

SEQ ID NO: 2725 - DNA, 15 bp, Artificial Sequence
  source: /note="Description of Artificial Sequence: Synthetic oligonucleotide"
agctatggcatgcac

SEQ ID NO: 2726 - DNA, 15 bp, Artificial Sequence
  source: /note="Description of Artificial Sequence: Synthetic oligonucleotide"
agctatggcatgcac

SEQ ID NO: 2727 - DNA, 15 bp, Artificial Sequence
  source: /note="Description of Artificial Sequence: Synthetic oligonucleotide"
agctatggcatgcac

SEQ ID NO: 2728 - DNA, 15 bp, Artificial Sequence
  source: /note="Description of Artificial Sequence: Synthetic oligonucleotide"
agctatggcatgcac

SEQ ID NO: 2729 - DNA, 15 bp, Artificial Sequence
  source: /note="Description of Artificial Sequence: Synthetic oligonucleotide"
agctatggcatgcac

SEQ ID NO: 2730 - DNA, 15 bp, Artificial Sequence
  source: /note="Description of Artificial Sequence: Synthetic oligonucleotide"
agctatggcatgcac

SEQ ID NO: 2731 - DNA, 15 bp, Artificial Sequence
  source: /note="Description of Artificial Sequence: Synthetic oligonucleotide"
agctatggcatgcac

SEQ ID NO: 2732 - DNA, 15 bp, Artificial Sequence
  source: /note="Description of Artificial Sequence: Synthetic oligonucleotide"
agctatggcatgcac

SEQ ID NO: 2733 - DNA, 15 bp, Artificial Sequence
  source: /note="Description of Artificial Sequence: Synthetic oligonucleotide"
agctatggcatgcac

SEQ ID NO: 2734 - DNA, 15 bp, Artificial Sequence
  source: /note="Description of Artificial Sequence: Synthetic oligonucleotide"
agctatggcatgcac

SEQ ID NO: 2735 - DNA, 15 bp, Artificial Sequence
  source: /note="Description of Artificial Sequence: Synthetic oligonucleotide"
agctatggcatgcac

SEQ ID NO: 2736 - DNA, 15 bp, Artificial Sequence
  source: /note="Description of Artificial Sequence: Synthetic oligonucleotide"
agctatggcatgcac

SEQ ID NO: 2737 - DNA, 15 bp, Artificial Sequence
  source: /note="Description of Artificial Sequence: Synthetic oligonucleotide"
agctatggcatgcac

SEQ ID NO: 2738 - DNA, 15 bp, Artificial Sequence
  source: /note="Description of Artificial Sequence: Synthetic oligonucleotide"
agctatggcatgcac

SEQ ID NO: 2739 - DNA, 15 bp, Artificial Sequence
  source: /note="Description of Artificial Sequence: Synthetic oligonucleotide"
agctatggcatgcac

SEQ ID NO: 2740 - DNA, 15 bp, Artificial Sequence
  source: /note="Description of Artificial Sequence: Synthetic oligonucleotide"
aactatggcatgcac

SEQ ID NO: 2741 - DNA, 15 bp, Artificial Sequence
  source: /note="Description of Artificial Sequence: Synthetic oligonucleotide"
aactatggcatgcac

SEQ ID NO: 2742 - DNA, 15 bp, Artificial Sequence
  source: /note="Description of Artificial Sequence: Synthetic oligonucleotide"
aactatggcatgcac

SEQ ID NO: 2743 - DNA, 15 bp, Artificial Sequence
  source: /note="Description of Artificial Sequence: Synthetic oligonucleotide"
aactatggcatgcac

SEQ ID NO: 2744 - DNA, 15 bp, Artificial Sequence
  source: /note="Description of Artificial Sequence: Synthetic oligonucleotide"
aactatggcatgcac

SEQ ID NO: 2745 - DNA, 15 bp, Artificial Sequence
  source: /note="Description of Artificial Sequence: Synthetic oligonucleotide"
aactatggcatgcac

SEQ ID NO: 2746 - DNA, 15 bp, Artificial Sequence
  source: /note="Description of Artificial Sequence: Synthetic oligonucleotide"
aactatggcatgcac

SEQ ID NO: 2747 - DNA, 15 bp, Artificial Sequence
  source: /note="Description of Artificial Sequence: Synthetic oligonucleotide"
aactatggcatgcac

SEQ ID NO: 2748 - DNA, 21 bp, Artificial Sequence
  source: /note="Description of Artificial Sequence: Synthetic oligonucleotide"
agtggtggttactactggagc

SEQ ID NO: 2749 - DNA, 21 bp, Artificial Sequence
  source: /note="Description of Artificial Sequence: Synthetic oligonucleotide"
agtggtggttactactggagc

SEQ ID NO: 2750 - DNA, 21 bp, Artificial Sequence
  source: /note="Description of Artificial Sequence: Synthetic oligonucleotide"
agtggtggttactactggagc

SEQ ID NO: 2751 - DNA, 21 bp, Artificial Sequence
  source: /note="Description of Artificial Sequence: Synthetic oligonucleotide"
agtggtggttactactggagc

SEQ ID NO: 2752 - DNA, 21 bp, Artificial Sequence
  source: /note="Description of Artificial Sequence: Synthetic oligonucleotide"
agtggtggttactactggagc

SEQ ID NO: 2753 - DNA, 21 bp, Artificial Sequence
  source: /note="Description of Artificial Sequence: Synthetic oligonucleotide"
agtggtggttactactggagc

SEQ ID NO: 2754 - DNA, 21 bp, Artificial Sequence
  source: /note="Description of Artificial Sequence: Synthetic oligonucleotide"
agtggtggttactactggagc

SEQ ID NO: 2755 - DNA, 15 bp, Artificial Sequence
  source: /note="Description of Artificial Sequence: Synthetic oligonucleotide"
ggctactatatccac

SEQ ID NO: 2756 - DNA, 15 bp, Artificial Sequence
  source: /note="Description of Artificial Sequence: Synthetic oligonucleotide"
ggctactatatccac

SEQ ID NO: 2757 - DNA, 15 bp, Artificial Sequence
  source: /note="Description of Artificial Sequence: Synthetic oligonucleotide"
ggctactatatccac

SEQ ID NO: 2758 - DNA, 15 bp, Artificial Sequence
  source: /note="Description of Artificial Sequence: Synthetic oligonucleotide"
ggctactatatccac

SEQ ID NO: 2759 - DNA, 15 bp, Artificial Sequence
  source: /note="Description of Artificial Sequence: Synthetic oligonucleotide"
ggctactatatccac

SEQ ID NO: 2760 - DNA, 15 bp, Artificial Sequence
  source: /note="Description of Artificial Sequence: Synthetic oligonucleotide"
ggctactatatccac

SEQ ID NO: 2761 - DNA, 15 bp, Artificial Sequence
  source: /note="Description of Artificial Sequence: Synthetic oligonucleotide"
ggctactatatccac

SEQ ID NO: 2762 - DNA, 15 bp, Artificial Sequence
  source: /note="Description of Artificial Sequence: Synthetic oligonucleotide"
ggctactatatccac

SEQ ID NO: 2763 - DNA, 15 bp, Artificial Sequence
  source: /note="Description of Artificial Sequence: Synthetic oligonucleotide"
ggctactatatccac

SEQ ID NO: 2764 - DNA, 15 bp, Artificial Sequence
  source: /note="Description of Artificial Sequence: Synthetic oligonucleotide"
ggctactatatccac

SEQ ID NO: 2765 - DNA, 15 bp, Artificial Sequence
  source: /note="Description of Artificial Sequence: Synthetic oligonucleotide"
ggctactatatccac

SEQ ID NO: 2766 - DNA, 15 bp, Artificial Sequence
  source: /note="Description of Artificial Sequence: Synthetic oligonucleotide"
ggctactatatacac

SEQ ID NO: 2767 - DNA, 15 bp, Artificial Sequence
  source: /note="Description of Artificial Sequence: Synthetic oligonucleotide"
ggctactatatacac

SEQ ID NO: 2768 - DNA, 15 bp, Artificial Sequence
  source: /note="Description of Artificial Sequence: Synthetic oligonucleotide"
ggctactatatacac

SEQ ID NO: 2769 - DNA, 15 bp, Artificial Sequence
  source: /note="Description of Artificial Sequence: Synthetic oligonucleotide"
ggctactatatacac

SEQ ID NO: 2770 - DNA, 15 bp, Artificial Sequence
  source: /note="Description of Artificial Sequence: Synthetic oligonucleotide"
ggctactatatacac

SEQ ID NO: 2771 - DNA, 15 bp, Artificial Sequence
  source: /note="Description of Artificial Sequence: Synthetic oligonucleotide"
ggctactatatacac

SEQ ID NO: 2772 - DNA, 15 bp, Artificial Sequence
  source: /note="Description of Artificial Sequence: Synthetic oligonucleotide"
ggctactatatacac

SEQ ID NO: 2773 - DNA, 15 bp, Artificial Sequence
  source: /note="Description of Artificial Sequence: Synthetic oligonucleotide"
ggctactatatacac

SEQ ID NO: 2774 - DNA, 15 bp, Artificial Sequence
  source: /note="Description of Artificial Sequence: Synthetic oligonucleotide"
ggctactatatacac

SEQ ID NO: 2775 - DNA, 15 bp, Artificial Sequence
  source: /note="Description of Artificial Sequence: Synthetic oligonucleotide"
ggctactatatccac

SEQ ID NO: 2776 - DNA, 15 bp, Artificial Sequence
  source: /note="Description of Artificial Sequence: Synthetic oligonucleotide"
ggctactatatccac

SEQ ID NO: 2777 - DNA, 15 bp, Artificial Sequence
  source: /note="Description of Artificial Sequence: Synthetic oligonucleotide"
ggctactatatccac

SEQ ID NO: 2778 - DNA, 15 bp, Artificial Sequence
  source: /note="Description of Artificial Sequence: Synthetic oligonucleotide"
ggctactatatccac

SEQ ID NO: 2779 - DNA, 15 bp, Artificial Sequence
  source: /note="Description of Artificial Sequence: Synthetic oligonucleotide"
ggctactatatccac

SEQ ID NO: 2780 - DNA, 15 bp, Artificial Sequence
  source: /note="Description of Artificial Sequence: Synthetic oligonucleotide"
ggctactatatacac

SEQ ID NO: 2781 - DNA, 15 bp, Artificial Sequence
  source: /note="Description of Artificial Sequence: Synthetic oligonucleotide"
ggctactatatacac

SEQ ID NO: 2782 - DNA, 15 bp, Artificial Sequence
  source: /note="Description of Artificial Sequence: Synthetic oligonucleotide"
ggctactatatacac

SEQ ID NO: 2783 - DNA, 15 bp, Artificial Sequence
  source: /note="Description of Artificial Sequence: Synthetic oligonucleotide"
ggctactatatacac

SEQ ID NO: 2784 - DNA, 15 bp, Artificial Sequence
  source: /note="Description of Artificial Sequence: Synthetic oligonucleotide"
ggctactatatacac

SEQ ID NO: 2785 - DNA, 15 bp, Artificial Sequence
  source: /note="Description of Artificial Sequence: Synthetic oligonucleotide"
ggctactatatacac

SEQ ID NO: 2786 - DNA, 15 bp, Artificial Sequence
  source: /note="Description of Artificial Sequence: Synthetic oligonucleotide"
ggctactatatacac

SEQ ID NO: 2787 - DNA, 15 bp, Artificial Sequence
  source: /note="Description of Artificial Sequence: Synthetic oligonucleotide"
ggctactatatacac

SEQ ID NO: 2788 - DNA, 15 bp, Artificial Sequence
  source: /note="Description of Artificial Sequence: Synthetic oligonucleotide"
ggctactatatacac

SEQ ID NO: 2789 - DNA, 15 bp, Artificial Sequence
  source: /note="Description of Artificial Sequence: Synthetic oligonucleotide"
ggctactatatacac

SEQ ID NO: 2790 - DNA, 15 bp, Artificial Sequence
  source: /note="Description of Artificial Sequence: Synthetic oligonucleotide"
ggctactatatacac

SEQ ID NO: 2791 - DNA, 15 bp, Artificial Sequence
  source: /note="Description of Artificial Sequence: Synthetic oligonucleotide"
ggctactatatacac

SEQ ID NO: 2792 - DNA, 15 bp, Artificial Sequence
  source: /note="Description of Artificial Sequence: Synthetic oligonucleotide"
ggctactatatacac

SEQ ID NO: 2793 - DNA, 15 bp, Artificial Sequence
  source: /note="Description of Artificial Sequence: Synthetic oligonucleotide"
ggctactatatgcat

SEQ ID NO: 2794 - DNA, 15 bp, Artificial Sequence
  source: /note="Description of Artificial Sequence: Synthetic oligonucleotide"
ggctactatatgcat

SEQ ID NO: 2795 - DNA, 15 bp, Artificial Sequence
  source: /note="Description of Artificial Sequence: Synthetic oligonucleotide"
ggctactatatgcat

SEQ ID NO: 2796 - DNA, 15 bp, Artificial Sequence
  source: /note="Description of Artificial Sequence: Synthetic oligonucleotide"
ggctactatatgcat

SEQ ID NO: 2797 - DNA, 15 bp, Artificial Sequence
  source: /note="Description of Artificial Sequence: Synthetic oligonucleotide"
ggctactatatgcat

SEQ ID NO: 2798 - DNA, 15 bp, Artificial Sequence
  source: /note="Description of Artificial Sequence: Synthetic oligonucleotide"
ggctactatatgcat

SEQ ID NO: 2799 - DNA, 15 bp, Artificial Sequence
  source: /note="Description of Artificial Sequence: Synthetic oligonucleotide"
ggctactatatgcat

SEQ ID NO: 2800 - DNA, 15 bp, Artificial Sequence
  source: /note="Description of Artificial Sequence: Synthetic oligonucleotide"
ggctactatatgcat

SEQ ID NO: 2801 - DNA, 15 bp, Artificial Sequence
  source: /note="Description of Artificial Sequence: Synthetic oligonucleotide"
ggctactatatgcat

SEQ ID NO: 2802 - DNA, 15 bp, Artificial Sequence
  source: /note="Description of Artificial Sequence: Synthetic oligonucleotide"
ggctactatatgcat

SEQ ID NO: 2803 - DNA, 15 bp, Artificial Sequence
  source: /note="Description of Artificial Sequence: Synthetic oligonucleotide"
ggctactatatgcat

SEQ ID NO: 2804 - DNA, 15 bp, Artificial Sequence
  source: /note="Description of Artificial Sequence: Synthetic oligonucleotide"
ggctactatatgcat

SEQ ID NO: 2805 - DNA, 15 bp, Artificial Sequence
  source: /note="Description of Artificial Sequence: Synthetic oligonucleotide"
ggctactatatgcat

SEQ ID NO: 2806 - DNA, 15 bp, Artificial Sequence
  source: /note="Description of Artificial Sequence: Synthetic oligonucleotide"
ggctactatatgcat

SEQ ID NO: 2807 - DNA, 15 bp, Artificial Sequence
  source: /note="Description of Artificial Sequence: Synthetic oligonucleotide"
aactttggcatgcac

SEQ ID NO: 2808 - DNA, 15 bp, Artificial Sequence
  source: /note="Description of Artificial Sequence: Synthetic oligonucleotide"
tactttggcatgcac

SEQ ID NO: 2809 - DNA, 15 bp, Artificial Sequence
  source: /note="Description of Artificial Sequence: Synthetic oligonucleotide"
ggctactatatgcat

SEQ ID NO: 2810 - DNA, 15 bp, Artificial Sequence
  source: /note="Description of Artificial Sequence: Synthetic oligonucleotide"
agctatggcatacac

SEQ ID NO: 2811 - DNA, 15 bp, Artificial Sequence
  source: /note="Description of Artificial Sequence: Synthetic oligonucleotide"
agttatgatatcaac

SEQ ID NO: 2812 - DNA, 15 bp, Artificial Sequence
  source: /note="Description of Artificial Sequence: Synthetic oligonucleotide"
agctatggcatacac

SEQ ID NO: 2813 - DNA, 15 bp, Artificial Sequence
  source: /note="Description of Artificial Sequence: Synthetic oligonucleotide"
agctatggcatacac

SEQ ID NO: 2814 - DNA, 15 bp, Artificial Sequence
  source: /note="Description of Artificial Sequence: Synthetic oligonucleotide"
agctatggcatacac

SEQ ID NO: 2815 - DNA, 15 bp, Artificial Sequence
  source: /note="Description of Artificial Sequence: Synthetic oligonucleotide"
agctatggcatacac

SEQ ID NO: 2816 - DNA, 15 bp, Artificial Sequence
  source: /note="Description of Artificial Sequence: Synthetic oligonucleotide"
agctatggcatacac

SEQ ID NO: 2817 - DNA, 15 bp, Artificial Sequence
  source: /note="Description of Artificial Sequence: Synthetic oligonucleotide"
agctatggcatacac

SEQ ID NO: 2818 - DNA, 15 bp, Artificial Sequence
  source: /note="Description of Artificial Sequence: Synthetic oligonucleotide"
agttatgatatcaac

SEQ ID NO: 2819 - DNA, 15 bp, Artificial Sequence
  source: /note="Description of Artificial Sequence: Synthetic oligonucleotide"
agttatgatatcaac

SEQ ID NO: 2820 - DNA, 15 bp, Artificial Sequence
  source: /note="Description of Artificial Sequence: Synthetic oligonucleotide"
agttatgatatcaac

SEQ ID NO: 2821 - DNA, 15 bp, Artificial Sequence
  source: /note="Description of Artificial Sequence: Synthetic oligonucleotide"
agttatgatatcaac

SEQ ID NO: 2822 - DNA, 15 bp, Artificial Sequence
  source: /note="Description of Artificial Sequence: Synthetic oligonucleotide"
agttatgatatcaac

SEQ ID NO: 2823 - DNA, 15 bp, Artificial Sequence
  source: /note="Description of Artificial Sequence: Synthetic oligonucleotide"
agttatgatatcaac

SEQ ID NO: 2824 - DNA, 15 bp, Artificial Sequence
  source: /note="Description of Artificial Sequence: Synthetic oligonucleotide"
agttatgatatcaac

SEQ ID NO: 2825 - DNA, 15 bp, Artificial Sequence
  source: /note="Description of Artificial Sequence: Synthetic oligonucleotide"
agttatgatatcaac

SEQ ID NO: 2826 - DNA, 15 bp, Artificial Sequence
  source: /note="Description of Artificial Sequence: Synthetic oligonucleotide"
agctatggcatacac

SEQ ID NO: 2827 - DNA, 51 bp, Artificial Sequence
  source: /note="Description of Artificial Sequence: Synthetic oligonucleotide"
tggatcaaccctaacagtggtggcacaaactatgcacagaagtttcagggc

SEQ ID NO: 2828 - DNA, 51 bp, Artificial Sequence
  source: /note="Description of Artificial Sequence: Synthetic oligonucleotide"
gttatatggtatgatggaagtaatgaaaactatgcagactccgtgaagggc

SEQ ID NO: 2829 - DNA, 51 bp, Artificial Sequence
  source: /note="Description of Artificial Sequence: Synthetic oligonucleotide"
gttatatggtatgatggaagtaataaatactatgcagactccgtgaagggc

SEQ ID NO: 2830 - DNA, 51 bp, Artificial Sequence; identical to SEQ ID NO: 2829
  source: /note="Description of Artificial Sequence: Synthetic oligonucleotide"

SEQ ID NO: 2831 - DNA, 51 bp, Artificial Sequence
  source: /note="Description of Artificial Sequence: Synthetic oligonucleotide"
tggatcaaccctgacagtggtggcacagactattcacagaggtttcagggc

SEQ ID NO: 2832 - DNA, 51 bp, Artificial Sequence; identical to SEQ ID NO: 2831
  source: /note="Description of Artificial Sequence: Synthetic oligonucleotide"

SEQ ID NO: 2833 - DNA, 51 bp, Artificial Sequence
  source: /note="Description of Artificial Sequence: Synthetic oligonucleotide"
tggatcagccctaacagtggtgacacaagctatgcacagaagtttcaggac

SEQ ID NO: 2834 - DNA, 51 bp, Artificial Sequence
  source: /note="Description of Artificial Sequence: Synthetic oligonucleotide"
tggataagccctaacaatggtgacacaaactatgcacagaagtttcaggac

SEQ ID NO: 2835 - DNA, 48 bp, Artificial Sequence
  source: /note="Description of Artificial Sequence: Synthetic oligonucleotide"
tacatctattacagtgggagcacctactacaacccgtccctcaagagt

SEQ ID NO: 2836 - DNA, 51 bp, Artificial Sequence
  source: /note="Description of Artificial Sequence: Synthetic oligonucleotide"
gctatatggtttgatggaagtgataaatactatgcagactccgtgaagggc

SEQ ID NO: 2837 - DNA, 51 bp, Artificial Sequence; identical to SEQ ID NO: 2829
  source: /note="Description of Artificial Sequence: Synthetic oligonucleotide"

SEQ ID NO: 2838 - DNA, 51 bp, Artificial Sequence
  source: /note="Description of Artificial Sequence: Synthetic oligonucleotide"
gctatatggtatgatggaaataataaatactatgcagactccgtgaagggc

SEQ ID NO: 2839 - DNA, 48 bp, Artificial Sequence
  source: /note="Description of Artificial Sequence: Synthetic oligonucleotide"
cgtatctataccagtgggagcaccaactacaacccctccctcaagagt

SEQ ID NO: 2840 - DNA, 48 bp, Artificial Sequence; identical to SEQ ID NO: 2839
  source: /note="Description of Artificial Sequence: Synthetic oligonucleotide"

SEQ ID NO: 2841 - DNA, 51 bp, Artificial Sequence
  source: /note="Description of Artificial Sequence: Synthetic oligonucleotide"
gttatatggtatgatgcaagtaataaatactatgcagacgccgtgaagggc

SEQ ID NO: 2842 - DNA, 51 bp, Artificial Sequence
  source: /note="Description of Artificial Sequence: Synthetic oligonucleotide"
gttatatggtatgatgcaagtaataaatactatgcagactccgtgaagggc

SEQ ID NO: 2843 - DNA, 51 bp, Artificial Sequence
  source: /note="Description of Artificial Sequence: Synthetic oligonucleotide"
gttatatggtatgatggaagtaataaatactatgcagacgccgtgaagggc

SEQ ID NO: 2844 - DNA, 51 bp, Artificial Sequence; identical to SEQ ID NO: 2841
  source: /note="Description of Artificial Sequence: Synthetic oligonucleotide"

SEQ ID NO: 2845 - DNA, 51 bp, Artificial Sequence; identical to SEQ ID NO: 2841
  source: /note="Description of Artificial Sequence: Synthetic oligonucleotide"

SEQ ID NO: 2846 - DNA, 51 bp, Artificial Sequence; identical to SEQ ID NO: 2841
  source: /note="Description of Artificial Sequence: Synthetic oligonucleotide"

SEQ ID NO: 2847 - DNA, 51 bp, Artificial Sequence
  source: /note="Description of Artificial Sequence: Synthetic oligonucleotide"
gttatatggtatgatgcaagtaatgaaaactatgcagacgccgtgaagggc

SEQ ID NO: 2848 - DNA, 51 bp, Artificial Sequence; identical to SEQ ID NO: 2847
  source: /note="Description of Artificial Sequence: Synthetic oligonucleotide"

SEQ ID NO: 2849 - DNA, 51 bp, Artificial Sequence; identical to SEQ ID NO: 2847
  source: /note="Description of Artificial Sequence: Synthetic oligonucleotide"

SEQ ID NO: 2850 - DNA, 51 bp, Artificial Sequence
  source: /note="Description of Artificial Sequence: Synthetic oligonucleotide"
gttatatggtatgatgcaagtaatgaaaactatgcagactccgtgaagggc

SEQ ID NO: 2851 - DNA, 51 bp, Artificial Sequence
  source: /note="Description of Artificial Sequence: Synthetic oligonucleotide"
gttatatggtatgatggaagtaatgaaaactatgcagacgccgtgaagggc

SEQ ID NO: 2852 - DNA, 51 bp, Artificial Sequence; identical to SEQ ID NO: 2847
  source: /note="Description of Artificial Sequence: Synthetic oligonucleotide"

SEQ ID NO: 2853 - DNA, 51 bp, Artificial Sequence; identical to SEQ ID NO: 2847
  source: /note="Description of Artificial Sequence: Synthetic oligonucleotide"

SEQ ID NO: 2854 - DNA, 51 bp, Artificial Sequence; identical to SEQ ID NO: 2828
  source: /note="Description of Artificial Sequence: Synthetic oligonucleotide"

SEQ ID NO: 2855 - DNA, 51 bp, Artificial Sequence; identical to SEQ ID NO: 2847
  source: /note="Description of Artificial Sequence: Synthetic oligonucleotide"

SEQ ID NO: 2856 - DNA, 51 bp, Artificial Sequence; identical to SEQ ID NO: 2847
  source: /note="Description of Artificial Sequence: Synthetic oligonucleotide"

SEQ ID NO: 2857 - DNA, 51 bp, Artificial Sequence; identical to SEQ ID NO: 2847
  source: /note="Description of Artificial Sequence: Synthetic oligonucleotide"

SEQ ID NO: 2858 - DNA, 51 bp, Artificial Sequence; identical to SEQ ID NO: 2847
  source: /note="Description of Artificial Sequence: Synthetic oligonucleotide"

SEQ ID NO: 2859 - DNA, 51 bp, Artificial Sequence; identical to SEQ ID NO: 2847
  source: /note="Description of Artificial Sequence: Synthetic oligonucleotide"

SEQ ID NO: 2860 - DNA, 51 bp, Artificial Sequence; identical to SEQ ID NO: 2847
  source: /note="Description of Artificial Sequence: Synthetic oligonucleotide"

SEQ ID NO: 2861 - DNA, 51 bp, Artificial Sequence; identical to SEQ ID NO: 2847
  source: /note="Description of Artificial Sequence: Synthetic oligonucleotide"

SEQ ID NO: 2862 - DNA, 51 bp, Artificial Sequence; identical to SEQ ID NO: 2851
  source: /note="Description of Artificial Sequence: Synthetic oligonucleotide"

SEQ ID NO: 2863 - DNA, 51 bp, Artificial Sequence; identical to SEQ ID NO: 2850
  source: /note="Description of Artificial Sequence: Synthetic oligonucleotide"

SEQ ID NO: 2864 - DNA, 51 bp, Artificial Sequence; identical to SEQ ID NO: 2847
  source: /note="Description of Artificial Sequence: Synthetic oligonucleotide"

SEQ ID NO: 2865 - DNA, 51 bp, Artificial Sequence; identical to SEQ ID NO: 2847
  source: /note="Description of Artificial Sequence: Synthetic oligonucleotide"

SEQ ID NO: 2866 - DNA, 51 bp, Artificial Sequence; identical to SEQ ID NO: 2841
  source: /note="Description of Artificial Sequence: Synthetic oligonucleotide"

SEQ ID NO: 2867 - DNA, 51 bp, Artificial Sequence; identical to SEQ ID NO: 2841
  source: /note="Description of Artificial Sequence: Synthetic oligonucleotide"

SEQ ID NO: 2868 - DNA, 51 bp, Artificial Sequence; identical to SEQ ID NO: 2841
  source: /note="Description of Artificial Sequence: Synthetic oligonucleotide"

SEQ ID NO: 2869 - DNA, 51 bp, Artificial Sequence; identical to SEQ ID NO: 2841
  source: /note="Description of Artificial Sequence: Synthetic oligonucleotide"

SEQ ID NO: 2870 - DNA, 51 bp, Artificial Sequence; identical to SEQ ID NO: 2841
  source: /note="Description of Artificial Sequence: Synthetic oligonucleotide"

SEQ ID NO: 2871 - DNA, 51 bp, Artificial Sequence; identical to SEQ ID NO: 2841
  source: /note="Description of Artificial Sequence: Synthetic oligonucleotide"

SEQ ID NO: 2872 - DNA, 51 bp, Artificial Sequence; identical to SEQ ID NO: 2841
  source: /note="Description of Artificial Sequence: Synthetic oligonucleotide"

SEQ ID NO: 2873 - DNA, 51 bp, Artificial Sequence; identical to SEQ ID NO: 2842
  source: /note="Description of Artificial Sequence: Synthetic oligonucleotide"

SEQ ID NO: 2874 - DNA, 51 bp, Artificial Sequence; identical to SEQ ID NO: 2843
  source: /note="Description of Artificial Sequence: Synthetic oligonucleotide"

SEQ ID NO: 2875 - DNA, 51 bp, Artificial Sequence; identical to SEQ ID NO: 2841
  source: /note="Description of Artificial Sequence: Synthetic oligonucleotide"

SEQ ID NO: 2876 - DNA, 51 bp, Artificial Sequence; identical to SEQ ID NO: 2841
  source: /note="Description of Artificial Sequence: Synthetic oligonucleotide"

SEQ ID NO: 2877 - DNA, 51 bp, Artificial Sequence; identical to SEQ ID NO: 2841
  source: /note="Description of Artificial Sequence: Synthetic oligonucleotide"

SEQ ID NO: 2878 - DNA, 51 bp, Artificial Sequence; identical to SEQ ID NO: 2841
  source: /note="Description of Artificial Sequence: Synthetic oligonucleotide"

SEQ ID NO: 2879 - DNA, 51 bp, Artificial Sequence; identical to SEQ ID NO: 2829
  source: /note="Description of Artificial Sequence: Synthetic oligonucleotide"

SEQ ID NO: 2880 - DNA, 51 bp, Artificial Sequence; identical to SEQ ID NO: 2842
  source: /note="Description of Artificial Sequence: Synthetic oligonucleotide"

SEQ ID NO: 2881 - DNA, 51 bp, Artificial Sequence; identical to SEQ ID NO: 2843
  source: /note="Description of Artificial Sequence: Synthetic oligonucleotide"

SEQ ID NO: 2882 - DNA, 51 bp, Artificial Sequence
  source: /note="Description of Artificial Sequence: Synthetic oligonucleotide"
gctatatggtatgatgcaaataataaatactatgcagacgccgtgaagggc

SEQ ID NO: 2883 - DNA, 51 bp, Artificial Sequence; identical to SEQ ID NO: 2882
  source: /note="Description of Artificial Sequence: Synthetic oligonucleotide"

SEQ ID NO: 2884 - DNA, 51 bp, Artificial Sequence; identical to SEQ ID NO: 2882
  source: /note="Description of Artificial Sequence: Synthetic oligonucleotide"

SEQ ID NO: 2885 - DNA, 51 bp, Artificial Sequence; identical to SEQ ID NO: 2882
  source: /note="Description of Artificial Sequence: Synthetic oligonucleotide"

SEQ ID NO: 2886 - DNA, 51 bp, Artificial Sequence; identical to SEQ ID NO: 2882
  source: /note="Description of Artificial Sequence: Synthetic oligonucleotide"

SEQ ID NO: 2887 - DNA, 51 bp, Artificial Sequence; identical to SEQ ID NO: 2882
  source: /note="Description of Artificial Sequence: Synthetic oligonucleotide"

SEQ ID NO: 2888 - DNA, 51 bp, Artificial Sequence; identical to SEQ ID NO: 2882
  source: /note="Description of Artificial Sequence: Synthetic oligonucleotide"

SEQ ID NO: 2889 - DNA, 51 bp, Artificial Sequence
  source: /note="Description of Artificial Sequence: Synthetic oligonucleotide"
gctatatggtatgatggaaataataaatactatgcagacgccgtgaagggc

SEQ ID NO: 2890 - DNA, 51 bp, Artificial Sequence
  source: /note="Description of Artificial Sequence: Synthetic oligonucleotide"
gctatatggtatgatgcaaataataaatactatgcagactccgtgaagggc

SEQ ID NO: 2891 - DNA, 51 bp, Artificial Sequence; identical to SEQ ID NO: 2882
  source: /note="Description of Artificial Sequence: Synthetic oligonucleotide"

SEQ ID NO: 2892 - DNA, 51 bp, Artificial Sequence; identical to SEQ ID NO: 2882
  source: /note="Description of Artificial Sequence: Synthetic oligonucleotide"

SEQ ID NO: 2893 - DNA, 51 bp, Artificial Sequence
  source: /note="Description of Artificial Sequence: Synthetic oligonucleotide"
gttatatggtatgatgcaagtaataaatactatgaagacgccgtgaagggc

SEQ ID NO: 2894 - DNA, 51 bp, Artificial Sequence
  source: /note="Description of Artificial Sequence: Synthetic oligonucleotide"
gttatatggtatgatggaagtaataaatactatgaagactccgtgaagggc

SEQ ID NO: 2895 - DNA, 51 bp, Artificial Sequence
  source: /note="Description of Artificial Sequence: Synthetic oligonucleotide"
gttatatggtatgatggaagtaataaatactatgaagacgccgtgaagggc

SEQ ID NO: 2896 - DNA, 51 bp, Artificial Sequence
  source: /note="Description of Artificial Sequence: Synthetic oligonucleotide"
gttatatggtatgatgcaagtaataaatactatgaagactccgtgaagggc

SEQ ID NO: 2897 - DNA, 51 bp, Artificial Sequence
  source: /note="Description of Artificial Sequence: Synthetic oligonucleotide"
gctatatggtttgatgcaagtgataaatactatgcagacgccgtgaagggc

SEQ ID NO: 2898 - DNA, 51 bp, Artificial Sequence
  source: /note="Description of Artificial Sequence: Synthetic oligonucleotide"
gctatatggtttgatgcaagtgataaatactatgcagactccgtgaagggc

SEQ ID NO: 2899 - DNA, 51 bp, Artificial Sequence
  source: /note="Description of Artificial Sequence: Synthetic oligonucleotide"
gctatatggtttgatggaagtgataaatactatgcagacgccgtgaagggc

SEQ ID NO: 2900 - DNA, 51 bp, Artificial Sequence; identical to SEQ ID NO: 2897
  source: /note="Description of Artificial Sequence: Synthetic oligonucleotide"

SEQ ID NO: 2901 - DNA, 51 bp, Artificial Sequence; identical to SEQ ID NO: 2897
  source: /note="Description of Artificial Sequence: Synthetic oligonucleotide"

SEQ ID NO: 2902 - DNA, 51 bp, Artificial Sequence; identical to SEQ ID NO: 2897
  source: /note="Description of Artificial Sequence: Synthetic oligonucleotide"

SEQ ID NO: 2903 - DNA, 51 bp, Artificial Sequence; identical to SEQ ID NO: 2897
  source: /note="Description of Artificial Sequence: Synthetic oligonucleotide"

SEQ ID NO: 2904 - DNA, 51 bp, Artificial Sequence; identical to SEQ ID NO: 2897
  source: /note="Description of Artificial Sequence: Synthetic oligonucleotide"

SEQ ID NO: 2905 - DNA, 48 bp, Artificial Sequence; identical to SEQ ID NO: 2835
  source: /note="Description of Artificial Sequence: Synthetic oligonucleotide"

SEQ ID NO: 2906 - DNA, 48 bp, Artificial Sequence; identical to SEQ ID NO: 2835
  source: /note="Description of Artificial Sequence: Synthetic oligonucleotide"

SEQ ID NO: 2907 - DNA, 48 bp, Artificial Sequence; identical to SEQ ID NO: 2835
  source: /note="Description of Artificial Sequence: Synthetic oligonucleotide"

SEQ ID NO: 2908 - DNA, 48 bp, Artificial Sequence; identical to SEQ ID NO: 2835
  source: /note="Description of Artificial Sequence: Synthetic oligonucleotide"

SEQ ID NO: 2909 - DNA, 48 bp, Artificial Sequence; identical to SEQ ID NO: 2835
  source: /note="Description of Artificial Sequence: Synthetic oligonucleotide"

SEQ ID NO: 2910 - DNA, 48 bp, Artificial Sequence; identical to SEQ ID NO: 2835
  source: /note="Description of Artificial Sequence: Synthetic oligonucleotide"

SEQ ID NO: 2911 - DNA, 48 bp, Artificial Sequence; identical to SEQ ID NO: 2835
  source: /note="Description of Artificial Sequence: Synthetic oligonucleotide"

SEQ ID NO: 2912 - DNA, 51 bp, Artificial Sequence
  source: /note="Description of Artificial Sequence: Synthetic oligonucleotide"
tggatcaaccctgaaagtggtggcacagactattcacagaggtttcagggc

SEQ ID NO: 2913 - DNA, 51 bp, Artificial Sequence; identical to SEQ ID NO: 2912
  source: /note="Description of Artificial Sequence: Synthetic oligonucleotide"

SEQ ID NO: 2914 - DNA, 51 bp, Artificial Sequence
  source: /note="Description of Artificial Sequence: Synthetic oligonucleotide"
tggatcaaccctgacgctggtggcacagactattcacagaggtttcagggc

SEQ ID NO: 2915 - DNA, 51 bp, Artificial Sequence; identical to SEQ ID NO: 2914
  source: /note="Description of Artificial Sequence: Synthetic oligonucleotide"

SEQ ID NO: 2916 - DNA, 51 bp, Artificial Sequence; identical to SEQ ID NO: 2831
  source: /note="Description of Artificial Sequence: Synthetic oligonucleotide"

SEQ ID NO: 2917 - DNA, 51 bp, Artificial Sequence; identical to SEQ ID NO: 2831
  source: /note="Description of Artificial Sequence: Synthetic oligonucleotide"

SEQ ID NO: 2918 - DNA, 51 bp, Artificial Sequence; identical to SEQ ID NO: 2831
  source: /note="Description of Artificial Sequence: Synthetic oligonucleotide"

SEQ ID NO: 2919 - DNA, 51 bp, Artificial Sequence; identical to SEQ ID NO: 2914
  source: /note="Description of Artificial Sequence: Synthetic oligonucleotide"

SEQ ID NO: 2920 - DNA, 51 bp, Artificial Sequence; identical to SEQ ID NO: 2914
  source: /note="Description of Artificial Sequence: Synthetic oligonucleotide"

SEQ ID NO: 2921 - DNA, 51 bp, Artificial Sequence; identical to SEQ ID NO: 2914
  source: /note="Description of Artificial Sequence: Synthetic oligonucleotide"

SEQ ID NO: 2922 - DNA, 51 bp, Artificial Sequence; identical to SEQ ID NO: 2912
  source: /note="Description of Artificial Sequence: Synthetic oligonucleotide"

SEQ ID NO: 2923 - DNA, 51 bp, Artificial Sequence
  source: /note="Description of Artificial Sequence: Synthetic oligonucleotide"
tggatcagccctaacagtggtgaaacaagctatgcacagaagtttcaggac

SEQ ID NO: 2924 - DNA, 51 bp, Artificial Sequence; identical to SEQ ID NO: 2833
  source: /note="Description of Artificial Sequence: Synthetic oligonucleotide"

SEQ ID NO: 2925 - DNA, 51 bp, Artificial Sequence; identical to SEQ ID NO: 2923
  source: /note="Description of Artificial Sequence: Synthetic oligonucleotide"

SEQ ID NO: 2926 - DNA, 51 bp, Artificial Sequence; identical to SEQ ID NO: 2923
  source: /note="Description of Artificial Sequence: Synthetic oligonucleotide"

SEQ ID NO: 2927 - DNA, 51 bp, Artificial Sequence; identical to SEQ ID NO: 2833
  source: /note="Description of Artificial Sequence: Synthetic oligonucleotide"

SEQ ID NO: 2928 - DNA, 51 bp, Artificial Sequence; identical to SEQ ID NO: 2923
  source: /note="Description of Artificial Sequence: Synthetic oligonucleotide"

SEQ ID NO: 2929 - DNA, 51 bp, Artificial Sequence; identical to SEQ ID NO: 2833
  source: /note="Description of Artificial Sequence: Synthetic oligonucleotide"

SEQ ID NO: 2930 - DNA, 51 bp, Artificial Sequence; identical to SEQ ID NO: 2923
  source: /note="Description of Artificial Sequence: Synthetic oligonucleotide"

SEQ ID NO: 2931 - DNA, 51 bp, Artificial Sequence; identical to SEQ ID NO: 2923
  source: /note="Description of Artificial Sequence: Synthetic oligonucleotide"

SEQ ID NO: 2932 - DNA, 51 bp, Artificial Sequence; identical to SEQ ID NO: 2912
  source: /note="Description of Artificial Sequence: Synthetic oligonucleotide"

SEQ ID NO: 2933 - DNA, 51 bp, Artificial Sequence; identical to SEQ ID NO: 2912
  source: /note="Description of Artificial Sequence: Synthetic oligonucleotide"

SEQ ID NO: 2934 - DNA, 51 bp, Artificial Sequence; identical to SEQ ID NO: 2831
  source: /note="Description of Artificial Sequence: Synthetic oligonucleotide"

SEQ ID NO: 2935 - DNA, 51 bp, Artificial Sequence; identical to SEQ ID NO: 2912
  source: /note="Description of Artificial Sequence: Synthetic oligonucleotide"

SEQ ID NO: 2936 - DNA, 51 bp, Artificial Sequence; identical to SEQ ID NO: 2912
  source: /note="Description of Artificial Sequence: Synthetic oligonucleotide"

SEQ ID NO: 2937 - DNA, 51 bp, Artificial Sequence
  source: /note="Description of Artificial Sequence: Synthetic oligonucleotide"
tggataagccctaaccaaggtgaaacaaactatgcacagaagtttcaggac

SEQ ID NO: 2938 - DNA, 51 bp, Artificial Sequence
  source: /note="Description of Artificial Sequence: Synthetic oligonucleotide"
tggataagccctaaccaaggtgacacaaactatgcacagaagtttcaggac

SEQ ID NO: 2939 - DNA, 51 bp, Artificial Sequence; identical to SEQ ID NO: 2937
  source: /note="Description of Artificial Sequence: Synthetic oligonucleotide"

SEQ ID NO: 2940 - DNA, 51 bp, Artificial Sequence
  source: /note="Description of Artificial Sequence: Synthetic oligonucleotide"
tggataagccctaacaatggtgaaacaaactatgcacagaagtttcaggac

SEQ ID NO: 2941 - DNA, 51 bp, Artificial Sequence; identical to SEQ ID NO: 2834
  source: /note="Description of Artificial Sequence: Synthetic oligonucleotide"

SEQ ID NO: 2942 - DNA, 51 bp, Artificial Sequence; identical to SEQ ID NO: 2938
  source: /note="Description of Artificial Sequence: Synthetic oligonucleotide"

SEQ ID NO: 2943 - DNA, 51 bp, Artificial Sequence; identical to SEQ ID NO: 2940
  source: /note="Description of Artificial Sequence: Synthetic oligonucleotide"

SEQ ID NO: 2944 - DNA, 51 bp, Artificial Sequence; identical to SEQ ID NO: 2937
  source: /note="Description of Artificial Sequence: Synthetic oligonucleotide"

SEQ ID NO: 2945 - DNA, 51 bp, Artificial Sequence; identical to SEQ ID NO: 2834
  source: /note="Description of Artificial Sequence: Synthetic oligonucleotide"

SEQ ID NO: 2946 - DNA, 51 bp, Artificial Sequence; identical to SEQ ID NO: 2938
  source: /note="Description of Artificial Sequence: Synthetic oligonucleotide"

SEQ ID NO: 2947 - DNA, 51 bp, Artificial Sequence; identical to SEQ ID NO: 2940
  source: /note="Description of Artificial Sequence: Synthetic oligonucleotide"

SEQ ID NO: 2948 - DNA, 51 bp, Artificial Sequence; identical to SEQ ID NO: 2937
  source: /note="Description of Artificial Sequence: Synthetic oligonucleotide"

SEQ ID NO: 2949 - DNA, 51 bp, Artificial Sequence; identical to SEQ ID NO: 2937
  source: /note="Description of Artificial Sequence: Synthetic oligonucleotide"

SEQ ID NO: 2950 - DNA, 51 bp, Artificial Sequence; identical to SEQ ID NO: 2827
  source: /note="Description of Artificial Sequence: Synthetic oligonucleotide"

SEQ ID NO: 2951 - DNA, 51 bp, Artificial Sequence; identical to SEQ ID NO: 2827
  source: /note="Description of Artificial Sequence: Synthetic oligonucleotide"

SEQ ID NO: 2952 - DNA, 51 bp, Artificial Sequence; identical to SEQ ID NO: 2827
  source: /note="Description of Artificial Sequence: Synthetic oligonucleotide"

SEQ ID NO: 2953 - DNA, 51 bp, Artificial Sequence; identical to SEQ ID NO: 2827
  source: /note="Description of Artificial Sequence: Synthetic oligonucleotide"

SEQ ID NO: 2954 - DNA, 51 bp, Artificial Sequence; identical to SEQ ID NO: 2827
  source: /note="Description of Artificial Sequence: Synthetic oligonucleotide"

SEQ ID NO: 2955 - DNA, 51 bp, Artificial Sequence; identical to SEQ ID NO: 2827
  source: /note="Description of Artificial Sequence: Synthetic oligonucleotide"

SEQ ID NO: 2956 - DNA, 51 bp, Artificial Sequence; identical to SEQ ID NO: 2827
  source: /note="Description of Artificial Sequence: Synthetic oligonucleotide"

SEQ ID NO: 2957 - DNA, 51 bp, Artificial Sequence; identical to SEQ ID NO: 2827
  source: /note="Description of Artificial Sequence: Synthetic oligonucleotide"

SEQ ID NO: 2958 - DNA, 51 bp, Artificial Sequence; identical to SEQ ID NO: 2827
  source: /note="Description of Artificial Sequence: Synthetic oligonucleotide"

SEQ ID NO: 2959 - DNA, 51 bp, Artificial Sequence; identical to SEQ ID NO: 2827
  source: /note="Description of Artificial Sequence: Synthetic oligonucleotide"

SEQ ID NO: 2960 - DNA, 51 bp, Artificial Sequence; identical to SEQ ID NO: 2827
  source: /note="Description of Artificial Sequence: Synthetic oligonucleotide"

SEQ ID NO: 2961 - DNA, 51 bp, Artificial Sequence; identical to SEQ ID NO: 2827
  source: /note="Description of Artificial Sequence: Synthetic oligonucleotide"

SEQ ID NO: 2962 - DNA, 51 bp, Artificial Sequence; identical to SEQ ID NO: 2827
  source: /note="Description of Artificial Sequence: Synthetic oligonucleotide"

SEQ ID NO: 2963 - DNA, 51 bp, Artificial Sequence; identical to SEQ ID NO: 2827
  source: /note="Description of Artificial Sequence: Synthetic oligonucleotide"

SEQ ID NO: 2964 - DNA, 51 bp, Artificial Sequence; identical to SEQ ID NO: 2847
  source: /note="Description of Artificial Sequence: Synthetic oligonucleotide"

SEQ ID NO: 2965 - DNA, 51 bp, Artificial Sequence; identical to SEQ ID NO: 2841
  source: /note="Description of Artificial Sequence: Synthetic oligonucleotide"

SEQ ID NO: 2966 - DNA, 51 bp, Artificial Sequence; identical to SEQ ID NO: 2827
  source: /note="Description of Artificial Sequence: Synthetic oligonucleotide"

SEQ ID NO: 2967 - DNA, 51 bp, Artificial Sequence
  source: /note="Description of Artificial Sequence: Synthetic oligonucleotide"
gttatatggtatgatggaagtaataagttccatgcagactccgtgaagggc

SEQ ID NO: 2968 - DNA, 51 bp, Artificial Sequence
  source: /note="Description of Artificial Sequence: Synthetic oligonucleotide"
tggatgaaccctaacagtggtaacacaggctatgcacagaagttccagggc

SEQ ID NO: 2969 - DNA, 51 bp, Artificial Sequence
  source: /note="Description of Artificial Sequence: Synthetic oligonucleotide"
gttatatggtatgatgcaagtaataagttccatgcagacgccgtgaagggc

SEQ ID NO: 2970 - DNA, 51 bp, Artificial Sequence; identical to SEQ ID NO: 2969
  source: /note="Description of Artificial Sequence: Synthetic oligonucleotide"

SEQ ID NO: 2971 - DNA, 51 bp, Artificial Sequence; identical to SEQ ID NO: 2969
  source: /note="Description of Artificial Sequence: Synthetic oligonucleotide"

SEQ ID NO: 2972 - DNA, 51 bp, Artificial Sequence; identical to SEQ ID NO: 2969
  source: /note="Description of Artificial Sequence: Synthetic oligonucleotide"

SEQ ID NO: 2973 - DNA, 51 bp, Artificial Sequence
  source: /note="Description of Artificial Sequence: Synthetic oligonucleotide"
gttatatggtatgatgcaagtaataagttccatgcagactccgtgaagggc

SEQ ID NO: 2974 - DNA, 51 bp, Artificial Sequence
  source: /note="Description of Artificial Sequence: Synthetic oligonucleotide"
gttatatggtatgatggaagtaataagttccatgcagacgccgtgaagggc

SEQ ID NO: 2975 - DNA, 51 bp, Artificial Sequence
  source: /note="Description of Artificial Sequence: Synthetic oligonucleotide"
tggatgaaccctaacagtggtggcacaggctatgcacagaagttccagggc

SEQ ID NO: 2976 - DNA, 51 bp, Artificial Sequence; identical to SEQ ID NO: 2968
  source: /note="Description of Artificial Sequence: Synthetic oligonucleotide"

SEQ ID NO: 2977 - DNA, 51 bp, Artificial Sequence; identical to SEQ ID NO: 2975
  source: /note="Description of Artificial Sequence: Synthetic oligonucleotide"

SEQ ID NO: 2978 - DNA, 51 bp, Artificial Sequence; identical to SEQ ID NO: 2975
  source: /note="Description of Artificial Sequence: Synthetic oligonucleotide"

SEQ ID NO: 2979 - DNA, 51 bp, Artificial Sequence; identical to SEQ ID NO: 2975
  source: /note="Description of Artificial Sequence: Synthetic oligonucleotide"

SEQ ID NO: 2980 - DNA, 51 bp, Artificial Sequence; identical to SEQ ID NO: 2968
  source: /note="Description of Artificial Sequence: Synthetic oligonucleotide"

SEQ ID NO: 2981 - DNA, 51 bp, Artificial Sequence; identical to SEQ ID NO: 2975
  source: /note="Description of Artificial Sequence: Synthetic oligonucleotide"

SEQ ID NO: 2982 - DNA, 51 bp, Artificial Sequence; identical to SEQ ID NO: 2975
  source: /note="Description of Artificial Sequence: Synthetic oligonucleotide"

SEQ ID NO: 2983 - DNA, 51 bp, Artificial Sequence; identical to SEQ ID NO: 2969
  source: /note="Description of Artificial Sequence: Synthetic oligonucleotide"

SEQ ID NO: 2984 - DNA, 57 bp, Artificial Sequence
  source: /note="Description of Artificial Sequence: Synthetic oligonucleotide"
gggggggattacgtttgggggacttatcggcctcactactactacggtatggacgtc

SEQ ID NO: 2985 - DNA, 36 bp, Artificial Sequence
  source: /note="Description of Artificial Sequence: Synthetic oligonucleotide"
gatgggacgatctttggagtggtcttgggggactac

SEQ ID NO: 2986 - DNA, 36 bp, Artificial Sequence
  source: /note="Description of Artificial Sequence: Synthetic oligonucleotide"
gatgggacgatttttggagtgctcttgggggactac

SEQ ID NO: 2987 - DNA, 33 bp, Artificial Sequence
  source: /note="Description of Artificial Sequence: Synthetic oligonucleotide"
gataggacgatttttggagtggttcttgactac

SEQ ID NO: 2988 - DNA, 42 bp, Artificial Sequence
  source: /note="Description of Artificial Sequence: Synthetic oligonucleotide"
gaggccacgatttttggaatggttattgtaccgtttgactac

SEQ ID NO: 2989 - DNA, 42 bp, Artificial Sequence; identical to SEQ ID NO: 2988
  source: /note="Description of Artificial Sequence: Synthetic oligonucleotide"

SEQ ID NO: 2990 - DNA, 42 bp, Artificial Sequence
  source: /note="Description of Artificial Sequence: Synthetic oligonucleotide"
gaggccacgatttttggaatgcttattgtaccatttgactac

SEQ ID NO: 2991 - DNA, 42 bp, Artificial Sequence; identical to SEQ ID NO: 2990
  source: /note="Description of Artificial Sequence: Synthetic oligonucleotide"

SEQ ID NO: 2992 - DNA, 48 bp, Artificial Sequence
  source: /note="Description of Artificial Sequence: Synthetic oligonucleotide"
gatcgtattacgatttttggagtggttatggggggcggtatggacgtc

SEQ ID NO: 2993 - DNA, 33 bp, Artificial Sequence
  source: /note="Description of Artificial Sequence: Synthetic oligonucleotide"
gatcaggcgatttttggagtggtccccgactac

SEQ ID NO: 2994 - DNA, 36 bp, Artificial Sequence; identical to SEQ ID NO: 2986
  source: /note="Description of Artificial Sequence: Synthetic oligonucleotide"

SEQ ID NO: 2995 - DNA, 33 bp, Artificial Sequence
  source: /note="Description of Artificial Sequence: Synthetic oligonucleotide"
gatcggacgatttttggagtggtccttgagtac

SEQ ID NO: 2996 - DNA, 27 bp, Artificial Sequence
  source: /note="Description of Artificial Sequence: Synthetic oligonucleotide"
gatgtagcagtggctggctttgactac

SEQ ID NO: 2997 - DNA, 27 bp, Artificial Sequence
  source: /note="Description of Artificial Sequence: Synthetic oligonucleotide"
gatgtagcagtggctggctttgactac

SEQ ID NO: 2998 - DNA, 36 bp, Artificial Sequence; identical to SEQ ID NO: 2986
  source: /note="Description of Artificial Sequence: Synthetic oligonucleotide"

SEQ ID NO: 2999 - DNA, 36 bp, Artificial Sequence; identical to SEQ ID NO: 2986
  source: /note="Description of Artificial Sequence: Synthetic oligonucleotide"

SEQ ID NO: 3000 - DNA, 36 bp, Artificial Sequence; identical to SEQ ID NO: 2986
  source: /note="Description of Artificial Sequence: Synthetic oligonucleotide"

SEQ ID NO: 3001 - DNA, 36 bp, Artificial Sequence; identical to SEQ ID NO: 2986
  source: /note="Description of Artificial Sequence: Synthetic oligonucleotide"

SEQ ID NO: 3002 - DNA, 36 bp, Artificial Sequence; identical to SEQ ID NO: 2986
  source: /note="Description of Artificial Sequence: Synthetic oligonucleotide"

SEQ ID NO: 3003 - DNA, 36 bp, Artificial Sequence
  source: /note="Description of Artificial Sequence: Synthetic oligonucleotide"
gataggacgatttttggagtgctcttgggggactac

SEQ ID NO: 3004 - DNA, 36 bp, Artificial Sequence; identical to SEQ ID NO: 2985
  source: /note="Description of Artificial Sequence: Synthetic oligonucleotide"

SEQ ID NO: 3005 - DNA, 36 bp, Artificial Sequence; identical to SEQ ID NO: 2985
  source: /note="Description of Artificial Sequence: Synthetic oligonucleotide"

SEQ ID NO: 3006 - DNA, 36 bp, Artificial Sequence; identical to SEQ ID NO: 2985
  source: /note="Description of Artificial Sequence: Synthetic oligonucleotide"

SEQ ID NO: 3007 - DNA, 36 bp, Artificial Sequence; identical to SEQ ID NO: 2985
  source: /note="Description of Artificial Sequence: Synthetic oligonucleotide"

SEQ ID NO: 3008 - DNA, 36 bp, Artificial Sequence; identical to SEQ ID NO: 2985
  source: /note="Description of Artificial Sequence: Synthetic oligonucleotide"

SEQ ID NO: 3009 - DNA, 36 bp, Artificial Sequence
  source: /note="Description of Artificial Sequence: Synthetic oligonucleotide"
gataggacgatctttggagtggtcttgggggactac

SEQ ID NO: 3010 - DNA, 36 bp, Artificial Sequence; identical to SEQ ID NO: 2985
  source: /note="Description of Artificial Sequence: Synthetic oligonucleotide"

SEQ ID NO: 3011 - DNA, 36 bp, Artificial Sequence; identical to SEQ ID NO: 2985
  source: /note="Description of Artificial Sequence: Synthetic oligonucleotide"

SEQ ID NO: 3012 - DNA, 36 bp, Artificial Sequence; identical to SEQ ID NO: 2985
  source: /note="Description of Artificial Sequence: Synthetic oligonucleotide"

SEQ ID NO: 3013 - DNA, 36 bp, Artificial Sequence; identical to SEQ ID NO: 2985
  source: /note="Description of Artificial Sequence: Synthetic oligonucleotide"

SEQ ID NO: 3014 - DNA, 36 bp, Artificial Sequence; identical to SEQ ID NO: 2985
  source: /note="Description of Artificial Sequence: Synthetic oligonucleotide"

SEQ ID NO: 3015 - DNA, 36 bp, Artificial Sequence; identical to SEQ ID NO: 2985
  source: /note="Description of Artificial Sequence: Synthetic oligonucleotide"

SEQ ID NO: 3016 - DNA, 36 bp, Artificial Sequence; identical to SEQ ID NO: 2985
  source: /note="Description of Artificial Sequence: Synthetic oligonucleotide"

SEQ ID NO: 3017 - DNA, 36 bp, Artificial Sequence; identical to SEQ ID NO: 2985
  source: /note="Description of Artificial Sequence: Synthetic oligonucleotide"

SEQ ID NO: 3018 - DNA, 36 bp, Artificial Sequence; identical to SEQ ID NO: 2985
  source: /note="Description of Artificial Sequence: Synthetic oligonucleotide"

SEQ ID NO: 3019 - DNA, 36 bp, Artificial Sequence; identical to SEQ ID NO: 2985
  source: /note="Description of Artificial Sequence: Synthetic oligonucleotide"

SEQ ID NO: 3020 - DNA, 36 bp, Artificial Sequence; identical to SEQ ID NO: 2985
  source: /note="Description of Artificial Sequence: Synthetic oligonucleotide"

SEQ ID NO: 3021 - DNA, 36 bp, Artificial Sequence; identical to SEQ ID NO: 3009
  source: /note="Description of Artificial Sequence: Synthetic oligonucleotide"

SEQ ID NO: 3022 - DNA, 36 bp, Artificial Sequence; identical to SEQ ID NO: 2985
  source: /note="Description of Artificial Sequence: Synthetic oligonucleotide"

SEQ ID NO: 3023 - DNA, 33 bp, Artificial Sequence; identical to SEQ ID NO: 2987
  source: /note="Description of Artificial Sequence: Synthetic oligonucleotide"

SEQ ID NO: 3024 - DNA, 33 bp, Artificial Sequence; identical to SEQ ID NO: 2987
  source: /note="Description of Artificial Sequence: Synthetic oligonucleotide"

SEQ ID NO: 3025 - DNA, 33 bp, Artificial Sequence; identical to SEQ ID NO: 2987
  source: /note="Description of Artificial Sequence: Synthetic oligonucleotide"

SEQ ID NO: 3026 - DNA, 33 bp, Artificial Sequence; identical to SEQ ID NO: 2987
  source: /note="Description of Artificial Sequence: Synthetic oligonucleotide"

SEQ ID NO: 3027 - DNA, 33 bp, Artificial Sequence; identical to SEQ ID NO: 2987
  source: /note="Description of Artificial Sequence: Synthetic oligonucleotide"

SEQ ID NO: 3028 - DNA, 33 bp, Artificial Sequence; identical to SEQ ID NO: 2987
  source: /note="Description of Artificial Sequence: Synthetic oligonucleotide"

SEQ ID NO: 3029 - DNA, 33 bp, Artificial Sequence; identical to SEQ ID NO: 2987
  source: /note="Description of Artificial Sequence: Synthetic oligonucleotide"

SEQ ID NO: 3030 - DNA, 33 bp, Artificial Sequence; identical to SEQ ID NO: 2987
  source: /note="Description of Artificial Sequence: Synthetic oligonucleotide"

SEQ ID NO: 3031 - DNA, 33 bp, Artificial Sequence; identical to SEQ ID NO: 2987
  source: /note="Description of Artificial Sequence: Synthetic oligonucleotide"

SEQ ID NO: 3032 - DNA, 36 bp, Artificial Sequence; identical to SEQ ID NO: 2986
  source: /note="Description of Artificial Sequence: Synthetic oligonucleotide"

SEQ ID NO: 3033 - DNA, 36 bp, Artificial Sequence; identical to SEQ ID NO: 3003
  source: /note="Description of Artificial Sequence: Synthetic oligonucleotide"

SEQ ID NO: 3034 - DNA, 36 bp, Artificial Sequence; identical to SEQ ID NO: 2986
  source: /note="Description of Artificial Sequence: Synthetic oligonucleotide"

SEQ ID NO: 3035 - DNA, 36 bp, Artificial Sequence; identical to SEQ ID NO: 3003
  source: /note="Description of Artificial Sequence: Synthetic oligonucleotide"

SEQ ID NO: 3036 - DNA, 36 bp, Artificial Sequence; identical to SEQ ID NO: 2986
  source: /note="Description of Artificial Sequence: Synthetic oligonucleotide"

SEQ ID NO: 3037 - DNA, 36 bp, Artificial Sequence; identical to SEQ ID NO: 2986
  source: /note="Description of Artificial Sequence: Synthetic oligonucleotide"

SEQ ID NO: 3038 - DNA, 36 bp, Artificial Sequence; identical to SEQ ID NO: 2986
  source: /note="Description of Artificial Sequence: Synthetic oligonucleotide"

SEQ ID NO: 3039 - DNA, 33 bp, Artificial Sequence; identical to SEQ ID NO: 2995
  source: /note="Description of Artificial Sequence: Synthetic oligonucleotide"

SEQ ID NO: 3040 - DNA, 33 bp, Artificial Sequence; identical to SEQ ID NO: 2995
  source: /note="Description of Artificial Sequence: Synthetic oligonucleotide"

SEQ ID NO: 3041 - DNA, 33 bp, Artificial Sequence; identical to SEQ ID NO: 2995
  source: /note="Description of Artificial Sequence: Synthetic oligonucleotide"

SEQ ID NO: 3042 - DNA, 33 bp, Artificial Sequence; identical to SEQ ID NO: 2995
  source: /note="Description of Artificial Sequence: Synthetic oligonucleotide"

SEQ ID NO: 3043 - DNA, 33 bp, Artificial Sequence; identical to SEQ ID NO: 2995
  source: /note="Description of Artificial Sequence: Synthetic oligonucleotide"

SEQ ID NO: 3044 - DNA, 33 bp, Artificial Sequence; identical to SEQ ID NO: 2995
  source: /note="Description of Artificial Sequence: Synthetic oligonucleotide"

SEQ ID NO: 3045 - DNA, 33 bp, Artificial Sequence; identical to SEQ ID NO: 2995
  source: /note="Description of Artificial Sequence: Synthetic oligonucleotide"

SEQ ID NO: 3046 - DNA, 33 bp, Artificial Sequence; identical to SEQ ID NO: 2995
  source: /note="Description of Artificial Sequence: Synthetic oligonucleotide"

SEQ ID NO: 3047 - DNA, 33 bp, Artificial Sequence; identical to SEQ ID NO: 2995
  source: /note="Description of Artificial Sequence: Synthetic oligonucleotide"

SEQ ID NO: 3048 - DNA, 33 bp, Artificial Sequence; identical to SEQ ID NO: 2995
  source: /note="Description of Artificial Sequence: Synthetic oligonucleotide"

SEQ ID NO: 3049 - DNA, 33 bp, Artificial Sequence; identical to SEQ ID NO: 2995
  source: /note="Description of Artificial Sequence: Synthetic oligonucleotide"

SEQ ID NO: 3050 - DNA, 33 bp, Artificial Sequence
  source: /note="Description of Artificial Sequence: Synthetic oligonucleotide"
gggattacgatttttggtcatgggtttgaatat

SEQ ID NO: 3051 - DNA, 33 bp, Artificial Sequence; identical to SEQ ID NO: 3050
  source: /note="Description of Artificial Sequence: Synthetic oligonucleotide"

SEQ ID NO: 3052 - DNA, 33 bp, Artificial Sequence; identical to SEQ ID NO: 3050
  source: /note="Description of Artificial Sequence: Synthetic oligonucleotide"

SEQ ID NO: 3053 - DNA, 33 bp, Artificial Sequence; identical to SEQ ID NO: 3050
  source: /note="Description of Artificial Sequence: Synthetic oligonucleotide"

SEQ ID NO: 3054 - DNA, 33 bp, Artificial Sequence; identical to SEQ ID NO: 2993
  source: /note="Description of Artificial Sequence: Synthetic oligonucleotide"

SEQ ID NO: 3055 - DNA, 33 bp, Artificial Sequence; identical to SEQ ID NO: 2993
  source: /note="Description of Artificial Sequence: Synthetic oligonucleotide"

SEQ ID NO: 3056 - DNA, 33 bp, Artificial Sequence; identical to SEQ ID NO: 2993
  source: /note="Description of Artificial Sequence: Synthetic oligonucleotide"

SEQ ID NO: 3057 - DNA, 33 bp, Artificial Sequence; identical to SEQ ID NO: 2993
  source: /note="Description of Artificial Sequence: Synthetic oligonucleotide"

SEQ ID NO: 3058 - DNA, 33 bp, Artificial Sequence; identical to SEQ ID NO: 2993
  source: /note="Description of Artificial Sequence: Synthetic oligonucleotide"

SEQ ID NO: 3059 - DNA, 33 bp, Artificial Sequence; identical to SEQ ID NO: 2993
  source: /note="Description of Artificial Sequence: Synthetic oligonucleotide"

SEQ ID NO: 3060 - DNA, 33 bp, Artificial Sequence; identical to SEQ ID NO: 2993
  source: /note="Description of Artificial Sequence: Synthetic oligonucleotide"

SEQ ID NO: 3061 - DNA, 33 bp, Artificial Sequence; identical to SEQ ID NO: 2993
  source: /note="Description of Artificial Sequence: Synthetic oligonucleotide"

SEQ ID NO: 3062 - DNA, 48 bp, Artificial Sequence; identical to SEQ ID NO: 2992
  source: /note="Description of Artificial Sequence: Synthetic oligonucleotide"

SEQ ID NO: 3063 - DNA, 48 bp, Artificial Sequence; identical to SEQ ID NO: 2992
  source: /note="Description of Artificial Sequence: Synthetic oligonucleotide"

SEQ ID NO: 3064 - DNA, 48 bp, Artificial Sequence; identical to SEQ ID NO: 2992
  source: /note="Description of Artificial Sequence: Synthetic oligonucleotide"

SEQ ID NO: 3065 - DNA, 48 bp, Artificial Sequence; identical to SEQ ID NO: 2992
  source: /note="Description of Artificial Sequence: Synthetic oligonucleotide"

SEQ ID NO: 3066 - DNA, 48 bp, Artificial Sequence; identical to SEQ ID NO: 2992
  source: /note="Description of Artificial Sequence: Synthetic oligonucleotide"

SEQ ID NO: 3067 - DNA, 48 bp, Artificial Sequence; identical to SEQ ID NO: 2992
  source: /note="Description of Artificial Sequence: Synthetic oligonucleotide"

SEQ ID NO: 3068 - DNA, 48 bp, Artificial Sequence; identical to SEQ ID NO: 2992
  source: /note="Description of Artificial Sequence: Synthetic oligonucleotide"

SEQ ID NO: 3069 - DNA, 42 bp, Artificial Sequence; identical to SEQ ID NO: 2988
  source: /note="Description of Artificial Sequence: Synthetic oligonucleotide"

SEQ ID NO: 3070 - DNA, 42 bp, Artificial Sequence; identical to SEQ ID NO: 2988
  source: /note="Description of Artificial Sequence: Synthetic oligonucleotide"

SEQ ID NO: 3071 - DNA, 42 bp, Artificial Sequence; identical to SEQ ID NO: 2988
  source: /note="Description of Artificial Sequence: Synthetic oligonucleotide"

SEQ ID NO: 3072 - DNA, 42 bp, Artificial Sequence; identical to SEQ ID NO: 2988
  source: /note="Description of Artificial Sequence: Synthetic oligonucleotide"

SEQ ID NO: 3073 - DNA, 42 bp, Artificial Sequence; identical to SEQ ID NO: 2988
  source: /note="Description of Artificial Sequence: Synthetic oligonucleotide"

SEQ ID NO: 3074 - DNA, 42 bp, Artificial Sequence; identical to SEQ ID NO: 2988
  source: /note="Description of Artificial Sequence: Synthetic oligonucleotide"

SEQ ID NO: 3075 - DNA, 42 bp, Artificial Sequence; identical to SEQ ID NO: 2988
  source: /note="Description of Artificial Sequence: Synthetic oligonucleotide"

SEQ ID NO: 3076 - DNA, 42 bp, Artificial Sequence; identical to SEQ ID NO: 2988
  source: /note="Description of Artificial Sequence: Synthetic oligonucleotide"

SEQ ID NO: 3077 - DNA, 42 bp, Artificial Sequence; identical to SEQ ID NO: 2988
  source: /note="Description of Artificial Sequence: Synthetic oligonucleotide"

SEQ ID NO: 3078 - DNA, 42 bp, Artificial Sequence; identical to SEQ ID NO: 2988
  source: /note="Description of Artificial Sequence: Synthetic oligonucleotide"

SEQ ID NO: 3079 - DNA, 42 bp, Artificial Sequence; identical to SEQ ID NO: 2988
  source: /note="Description of Artificial Sequence: Synthetic oligonucleotide"

SEQ ID NO: 3080 - DNA, 42 bp, Artificial Sequence; identical to SEQ ID NO: 2990
  source: /note="Description of Artificial Sequence: Synthetic oligonucleotide"

SEQ ID NO: 3081 - DNA, 42 bp, Artificial Sequence; identical to SEQ ID NO: 2990
  source: /note="Description of Artificial Sequence: Synthetic oligonucleotide"

SEQ ID NO: 3082 - DNA, 42 bp, Artificial Sequence; identical to SEQ ID NO: 2990
  source: /note="Description of Artificial Sequence: Synthetic oligonucleotide"

SEQ ID NO: 3083 - DNA, 42 bp, Artificial Sequence; identical to SEQ ID NO: 2990
  source: /note="Description of Artificial Sequence: Synthetic oligonucleotide"

SEQ ID NO: 3084 - DNA, 42 bp, Artificial Sequence; identical to SEQ ID NO: 2990
  source: /note="Description of Artificial Sequence: Synthetic oligonucleotide"

SEQ ID NO: 3085 - DNA, 42 bp, Artificial Sequence; identical to SEQ ID NO: 2990
  source: /note="Description of Artificial Sequence: Synthetic oligonucleotide"

SEQ ID NO: 3086 - DNA, 42 bp, Artificial Sequence; identical to SEQ ID NO: 2990
  source: /note="Description of Artificial Sequence: Synthetic oligonucleotide"

SEQ ID NO: 3087 - DNA, 42 bp, Artificial Sequence; identical to SEQ ID NO: 2990
  source: /note="Description of Artificial Sequence: Synthetic oligonucleotide"

SEQ ID NO: 3088 - DNA, 42 bp, Artificial Sequence; identical to SEQ ID NO: 2990
  source: /note="Description of Artificial Sequence: Synthetic oligonucleotide"

SEQ ID NO: 3089 - DNA, 42 bp, Artificial Sequence; identical to SEQ ID NO: 2988
  source: /note="Description of Artificial Sequence: Synthetic oligonucleotide"

SEQ ID NO: 3090 - DNA, 42 bp, Artificial Sequence; identical to SEQ ID NO: 2988
  source: /note="Description of Artificial Sequence: Synthetic oligonucleotide"

SEQ ID NO: 3091 - DNA, 42 bp, Artificial Sequence; identical to SEQ ID NO: 2988
  source: /note="Description of Artificial Sequence: Synthetic oligonucleotide"

SEQ ID NO: 3092 - DNA, 42 bp, Artificial Sequence; identical to SEQ ID NO: 2988
  source: /note="Description of Artificial Sequence: Synthetic oligonucleotide"

SEQ ID NO: 3093 - DNA, 42 bp, Artificial Sequence; identical to SEQ ID NO: 2988
  source: /note="Description of Artificial Sequence: Synthetic oligonucleotide"

SEQ ID NO: 3094 - DNA, 42 bp, Artificial Sequence; identical to SEQ ID NO: 2990
  source: /note="Description of Artificial Sequence: Synthetic oligonucleotide"

SEQ ID NO: 3095 - DNA, 42 bp, Artificial Sequence; identical to SEQ ID NO: 2990
  source: /note="Description of Artificial Sequence: Synthetic oligonucleotide"

SEQ ID NO: 3096 - DNA, 42 bp, Artificial Sequence; identical to SEQ ID NO: 2990
  source: /note="Description of Artificial Sequence: Synthetic oligonucleotide"

SEQ ID NO: 3097 - DNA, 42 bp, Artificial Sequence; identical to SEQ ID NO: 2990
  source: /note="Description of Artificial Sequence: Synthetic oligonucleotide"

SEQ ID NO: 3098 - DNA, 42 bp, Artificial Sequence; identical to SEQ ID NO: 2990
  source: /note="Description of Artificial Sequence: Synthetic oligonucleotide"

SEQ ID NO: 3099 - DNA, 42 bp, Artificial Sequence; identical to SEQ ID NO: 2990
  source: /note="Description of Artificial Sequence: Synthetic oligonucleotide"

SEQ ID NO: 3100 - DNA, 42 bp, Artificial Sequence; identical to SEQ ID NO: 2990
  source: /note="Description of Artificial Sequence: Synthetic oligonucleotide"

SEQ ID NO: 3101 - DNA, 42 bp, Artificial Sequence; identical to SEQ ID NO: 2990
  source: /note="Description of Artificial Sequence: Synthetic oligonucleotide"

SEQ ID NO: 3102 - DNA, 42 bp, Artificial Sequence; identical to SEQ ID NO: 2990
  source: /note="Description of Artificial Sequence: Synthetic oligonucleotide"

SEQ ID NO: 3103 - DNA, 42 bp, Artificial Sequence; identical to SEQ ID NO: 2990
  source: /note="Description of Artificial Sequence: Synthetic oligonucleotide"

SEQ ID NO: 3104 - DNA, 42 bp, Artificial Sequence; identical to SEQ ID NO: 2990
  source: /note="Description of Artificial Sequence: Synthetic oligonucleotide"

SEQ ID NO: 3105 - DNA, 42 bp, Artificial Sequence; identical to SEQ ID NO: 2990
  source: /note="Description of Artificial Sequence: Synthetic oligonucleotide"

SEQ ID NO: 3106 - DNA, 42 bp, Artificial Sequence; identical to SEQ ID NO: 2990
  source: /note="Description of Artificial Sequence: Synthetic oligonucleotide"

SEQ ID NO: 3107 - DNA, 57 bp, Artificial Sequence; identical to SEQ ID NO: 2984
  source: /note="Description of Artificial Sequence: Synthetic oligonucleotide"

SEQ ID NO: 3108 - DNA, 57 bp, Artificial Sequence; identical to SEQ ID NO: 2984
  source: /note="Description of Artificial Sequence: Synthetic oligonucleotide"

SEQ ID NO: 3109 - DNA, 57 bp, Artificial Sequence; identical to SEQ ID NO: 2984
  source: /note="Description of Artificial Sequence: Synthetic oligonucleotide"

SEQ ID NO: 3110 - DNA, 57 bp, Artificial Sequence; identical to SEQ ID NO: 2984
  source: /note="Description of Artificial Sequence: Synthetic oligonucleotide"

SEQ ID NO: 3111 - DNA, 57 bp, Artificial Sequence; identical to SEQ ID NO: 2984
  source: /note="Description of Artificial Sequence: Synthetic oligonucleotide"

SEQ ID NO: 3112 - DNA, 57 bp, Artificial Sequence; identical to SEQ ID NO: 2984
  source: /note="Description of Artificial Sequence: Synthetic oligonucleotide"

SEQ ID NO: 3113 - DNA, 57 bp, Artificial Sequence; identical to SEQ ID NO: 2984
  source: /note="Description of Artificial Sequence: Synthetic oligonucleotide"

SEQ ID NO: 3114 - DNA, 57 bp, Artificial Sequence; identical to SEQ ID NO: 2984
  source: /note="Description of Artificial Sequence: Synthetic oligonucleotide"

SEQ ID NO: 3115 - DNA, 57 bp, Artificial Sequence; identical to SEQ ID NO: 2984
  source: /note="Description of Artificial Sequence: Synthetic oligonucleotide"

SEQ ID NO: 3116 - DNA, 57 bp, Artificial Sequence; identical to SEQ ID NO: 2984
  source: /note="Description of Artificial Sequence: Synthetic oligonucleotide"

SEQ ID NO: 3117 - DNA, 57 bp, Artificial Sequence; identical to SEQ ID NO: 2984
  source: /note="Description of Artificial Sequence: Synthetic oligonucleotide"

SEQ ID NO: 3118 - DNA, 57 bp, Artificial Sequence; identical to SEQ ID NO: 2984
  source: /note="Description of Artificial Sequence: Synthetic oligonucleotide"

SEQ ID NO: 3119 - DNA, 57 bp, Artificial Sequence
  source: /note="Description of Artificial Sequence: Synthetic oligonucleotide"
gggggggattacgttttcgggacttatcggcctcactactactacggtatggacgtc

SEQ ID NO: 3120 - DNA, 57 bp, Artificial Sequence; identical to SEQ ID NO: 3119
  source: /note="Description of Artificial Sequence: Synthetic oligonucleotide"

SEQ ID NO: 3121 - DNA, 36 bp, Artificial Sequence; identical to SEQ ID NO: 3009
  source: /note="Description of Artificial Sequence: Synthetic oligonucleotide"

SEQ ID NO: 3122 - DNA, 36 bp, Artificial Sequence; identical to SEQ ID NO: 3003
  source: /note="Description of Artificial Sequence: Synthetic oligonucleotide"

SEQ ID NO: 3123 - DNA, 57 bp, Artificial Sequence; identical to SEQ ID NO: 2984
  source: /note="Description of Artificial Sequence: Synthetic oligonucleotide"

SEQ ID NO: 3124 - DNA, 36 bp, Artificial Sequence
  source: /note="Description of Artificial Sequence: Synthetic oligonucleotide"
ggaaaagtggctggtatgcctgaagcttttgaaatc

SEQ ID NO: 3125 - DNA, 60 bp, Artificial Sequence
  source: /note="Description of Artificial Sequence: Synthetic oligonucleotide"
gggggtgattacgtttgggggagttatcgtccctactactactactacggtatggacgtc

SEQ ID NO: 3126 - DNA, 36 bp, Artificial Sequence; identical to SEQ ID NO: 3124
  source: /note="Description of Artificial Sequence: Synthetic oligonucleotide"

SEQ ID NO: 3127 - DNA, 36 bp, Artificial Sequence; identical to SEQ ID NO: 3124
  source: /note="Description of Artificial Sequence: Synthetic oligonucleotide"

SEQ ID NO: 3128 - DNA, 36 bp, Artificial Sequence; identical to SEQ ID NO: 3124
  source: /note="Description of Artificial Sequence: Synthetic oligonucleotide"

SEQ ID NO: 3129 - DNA, 36 bp, Artificial Sequence; identical to SEQ ID NO: 3124
  source: /note="Description of Artificial Sequence: Synthetic oligonucleotide"

SEQ ID NO: 3130 - DNA, 36 bp, Artificial Sequence; identical to SEQ ID NO: 3124
  source: /note="Description of Artificial Sequence: Synthetic oligonucleotide"

SEQ ID NO: 3131 - DNA, 36 bp, Artificial Sequence; identical to SEQ ID NO: 3124
  source: /note="Description of Artificial Sequence: Synthetic oligonucleotide"

SEQ ID NO: 3132 - DNA, 60 bp, Artificial Sequence; identical to SEQ ID NO: 3125
  source: /note="Description of Artificial Sequence: Synthetic oligonucleotide"

SEQ ID NO: 3133 - DNA, 60 bp, Artificial Sequence; identical to SEQ ID NO: 3125
  source: /note="Description of Artificial Sequence: Synthetic oligonucleotide"

SEQ ID NO: 3134 - DNA, 60 bp, Artificial Sequence; identical to SEQ ID NO: 3125
  source: /note="Description of Artificial Sequence: Synthetic oligonucleotide"

SEQ ID NO: 3135 - DNA, 60 bp, Artificial Sequence; identical to SEQ ID NO: 3125
  source: /note="Description of Artificial Sequence: Synthetic oligonucleotide"

SEQ ID NO: 3136 - DNA, 60 bp, Artificial Sequence; identical to SEQ ID NO: 3125
  source: /note="Description of Artificial Sequence: Synthetic oligonucleotide"

SEQ ID NO: 3137 - DNA, 60 bp, Artificial Sequence; identical to SEQ ID NO: 3125
  source: /note="Description of Artificial Sequence: Synthetic oligonucleotide"

SEQ ID NO: 3138 - DNA, 60 bp, Artificial Sequence
  source: /note="Description of Artificial Sequence: Synthetic oligonucleotide"
gggggtgattacgttttcgggagttatcgtccctactactactactacggtatggacgtc

SEQ ID NO: 3139 - DNA, 60 bp, Artificial Sequence; identical to SEQ ID NO: 3138
  source: /note="Description of Artificial Sequence: Synthetic oligonucleotide"

SEQ ID NO: 3140 - DNA, 36 bp, Artificial Sequence; identical to SEQ ID NO: 3124
  source: /note="Description of Artificial Sequence: Synthetic oligonucleotide"

SEQ ID NO: 3141 - protein, 466 aa, Homo sapiens
MTTSPILQLLLRLSLCGLLLQRAETGSKGQTAGELYQRWERYRRECQETLAAAEPPSGLACNGSFDMYVCWDYAAPNATARASCPWYLPWHHHVAAGFVLRQCGSDGQWGLWRDHTQCENPEKNEAFLDQRLILERLQVMYTVGYSLSLATLLLALLILSLFRRLHCTRNYIHINLFTSFMLRAAAILSRDRLLPRPGPYLGDQALALWNQALAACRTAQIVTQYCVGANYTWLLVEGVYLHSLLVLVGGSEEGHFRYYLLLGWGAPALFVIPWVIVRYLYENTQCWERNEVKAIWWIIRTPILMTILINFLIFIRILGILLSKLRTRQMRCRDYRLRLARSTLTLVPLLGVHEVVFAPVTEEQARGALRFAKLGFEIFLSSFQGFLVSVLYCFINKEVQSEIRRGWHHCRLRRSLGEEQRQLPERAFRALPSGSGPGEVPTSRGLSSGTLPGPGNEASRELESYC

SEQ ID NO: 3142 - DNA, 2024 bp, Homo sapiens
ggcagcggtggcaggggctgcaggagcaagtgaccaggagcaggactggggacaggcctgatcgcccctgcacgaaccagacccttcgccgccctcacgatgactacctctccgatcctgcagctgctgctgcggctctcactgtgcgggctgctgctccagagggcggagacaggctctaaggggcagacggcgggggagctgtaccagcgctgggaacggtaccgcagggagtgccaggagaccttggcagccgcggaaccgccttcaggcctcgcctgtaacgggtccttcgatatgtacgtctgctgggactatgctgcacccaatgccactgcccgtgcgtcctgcccctggtacctgccctggcaccaccatgtggctgcaggtttcgtcctccgccagtgtggcagtgatggccaatggggactttggagagaccatacacaatgtgagaacccagagaagaatgaggcctttctggaccaaaggctcatcttggagcggttgcaggtcatgtacactgtcggctactccctgtctctcgccacactgctgctagccctgctcatcttgagtttgttcaggcggctacattgcactagaaactatatccacatcaacctgttcacgtctttcatgctgcgagctgcggccattctcagccgagaccgtctgctacctcgacctggcccctaccttggggaccaggcccttgcgctgtggaaccaggccctcgctgcctgccgcacggcccagatcgtgacccagtactgcgtgggtgccaactacacgtggctgctggtggagggcgtctacctgcacagtctcctggtgctcgtgggaggctccgaggagggccacttccgctactacctgctcctcggctggggggcccccgcgcttttcgtcattccctgggtgatcgtcaggtacctgtacgagaacacgcagtgctgggagcgcaacgaagtcaaggccatttggtggattatacggacccccatcctcatgaccatcttgattaatttcctcatttttatccgcattcttggcattctcctgtccaagctgaggacacggcaaatgcgctgccgggattaccggctgaggctggctcgctccacgctgacgctggtgcccctgctgggtgtccacgaggtggtgtttgctcccgtgacagaggaacaggcccggggcgccctgcgcttcgccaagctcggctttgagatcttcctcagctccttccagggcttcctggtcagcgtcctctactgcttcatcaacaaggaggtgcagtcggagatccgccgtggctggcaccactgccgcctgcgccgcagcctgggcgaggagcaacgccagctcccggagcgcgccttccgggccctgccctccggctccggcccgggcgaggtccccaccagccgcggcttgtcctcggggaccctcccagggcctgggaatgaggccagccgggagttggaaagttactgctagggggcgggatccccgtgtctgttcagttagcatggatttattgagtgccaactgcgtgccaggcccagtacggaggacgctggggaaatggtgaaggaaacagaaaaaaggtccctgcccttctggagatgacaactgagtggggaaaacagaccgtgaacacaaaacatcaagttccacacacgctatggaatggttatgaagggaagcgagaagggggcctagggtggtctgggaggcgtctccaaggaggtgacacttaagccatccccgaaagaggtgaaagagatcactttggggagagctggagaacaggattctaggcggaagcgatagcataggcaaaggcccttgggcaggaaggcgctcagccttggctggagtagaattaagtcagagccaacaggtggggagagacagagaagtgggcaggggcacccaagttgggatttcatttcaggtgcattggagattcttaggagtgtctcttgggggtaatattttattttttaaaaaatgaggat

SEQ ID NO: 3143 - protein, 430 aa, Homo sapiens
MTTSPILQLLLRLSLCGLLLQRAETGSKGQTAGELYQRWERYRRECQETLAAAEPPSVAAGFVLRQCGSDGQWGLWRDHTQCENPEKNEAFLDQRLILERLQVMYTVGYSLSLATLLLALLILSLFRRLHCTRNYIHINLFTSFMLRAAAILSRDRLLPRPGPYLGDQALALWNQALAACRTAQIVTQYCVGANYTWLLVEGVYLHSLLVLVGGSEEGHFRYYLLLGWGAPALFVIPWVIVRYLYENTQCWERNEVKAIWWIIRTPILMTILINFLIFIRILGILLSKLRTRQMRCRDYRLRLARSTLTLVPLLGVHEVVFAPVTEEQARGALRFAKLGFEIFLSSFQGFLVSVLYCFINKEVQSEIRRGWHHCRLRRSLGEEQRQLPERAFRALPSGSGPGEVPTSRGLSSGTLPGPGNEASRELESYC

SEQ ID NO: 3144 - DNA, 1290 bp, Homo sapiens
atgaccaccagcccgattctgcagctgctgctgcgcctgagcctgtgcggcctgctgctgcagcgcgcggaaaccggcagcaaaggccagaccgcgggcgaactgtatcagcgctgggaacgctatcgccgcgaatgccaggaaaccctggcggcggcggaaccgccgagcgtggcggcgggctttgtgctgcgccagtgcggcagcgatggccagtggggcctgtggcgcgatcatacccagtgcgaaaacccggaaaaaaacgaagcgtttctggatcagcgcctgattctggaacgcctgcaggtgatgtataccgtgggctatagcctgagcctggcgaccctgctgctggcgctgctgattctgagcctgtttcgccgcctgcattgcacccgcaactatattcatattaacctgtttaccagctttatgctgcgcgcggcggcgattctgagccgcgatcgcctgctgccgcgcccgggcccgtatctgggcgatcaggcgctggcgctgtggaaccaggcgctggcggcgtgccgcaccgcgcagattgtgacccagtattgcgtgggcgcgaactatacctggctgctggtggaaggcgtgtatctgcatagcctgctggtgctggtgggcggcagcgaagaaggccattttcgctattatctgctgctgggctggggcgcgccggcgctgtttgtgattccgtgggtgattgtgcgctatctgtatgaaaacacccagtgctgggaacgcaacgaagtgaaagcgatttggtggattattcgcaccccgattctgatgaccattctgattaactttctgatttttattcgcattctgggcattctgctgagcaaactgcgcacccgccagatgcgctgccgcgattatcgcctgcgcctggcgcgcagcaccctgaccctggtgccgctgctgggcgtgcatgaagtggtgtttgcgccggtgaccgaagaacaggcgcgcggcgcgctgcgctttgcgaaactgggctttgaaatttttctgagcagctttcagggctttctggtgagcgtgctgtattgctttattaacaaagaagtgcagagcgaaattcgccgcggctggcatcattgccgcctgcgccgcagcctgggcgaagaacagcgccagctgccggaacgcgcgtttcgcgcgctgccgagcggcagcggcccgggcgaagtgccgaccagccgcggcctgagcagcggcaccctgccgggcccgggcaacgaagcgagccgcgaactggaaagctattgc

SEQ ID NO: 3145 - protein, 493 aa, Artificial Sequence
  source: /note="Description of Artificial Sequence: Synthetic polypeptide"
MTTSPILQLLLRLSLCGLLLQRAETGSKGQTAGELYQRWERYRRECQETLAAAEPPSGLACNGSFDMYVCWDYAAPNATARASCPWYLPWHHHVAAGFVLRQCGSDGQWGLWRDHTQCENPEKNEAFLDQRLILERLQVMYTVGYSLSLATLLLALLILSLFRRLHCTRNYIHINLFTSFMLRAAAILSRDRLLPRPGPYLGDQALALWNQALAACRTAQIVTQYCVGANYTWLLVEGVYLHSLLVLVGGSEEGHFRYYLLLGWGAPALFVIPWVIVRYLYENTQCWERNEVKAIWWIIRTPILMTILINFLIFIRILGILLSKLRTRQMRCRDYRLRLARSTLTLVPLLGVHEVVFAPVTEEQARGALRFAKLGFEIFLSSFQGFLVSVLYCFINKEVGRDPAAAPALWRRRGTAPPLSAIVSQVQSEIRRGWHHCRLRRSLGEEQRQLPERAFRALPSGSGPGEVPTSRGLSSGTLPGPGNEASRELESYC

SEQ ID NO: 3146 - DNA, 1482 bp, Artificial Sequence
  source: /note="Description of Artificial Sequence: Synthetic polynucleotide"
atgaccaccagcccgattctgcagctgctgctgcgcctgagcctgtgcggcctgctgctgcagcgcgcggaaaccggcagcaaaggccagaccgcgggcgaactgtatcagcgctgggaacgctatcgccgcgaatgccaggaaaccctggcggcggcggaaccgccgagcggcctggcgtgcaacggcagctttgatatgtatgtgtgctgggattatgcggcgccgaacgcgaccgcgcgcgcgagctgcccgtggtatctgccgtggcatcatcatgtggcggcgggctttgtgctgcgccagtgcggcagcgatggccagtggggcctgtggcgcgatcatacccagtgcgaaaacccggaaaaaaacgaagcgtttctggatcagcgcctgattctggaacgcctgcaggtgatgtataccgtgggctatagcctgagcctggcgaccctgctgctggcgctgctgattctgagcctgtttcgccgcctgcattgcacccgcaactatattcatattaacctgtttaccagctttatgctgcgcgcggcggcgattctgagccgcgatcgcctgctgccgcgcccgggcccgtatctgggcgatcaggcgctggcgctgtggaaccaggcgctggcggcgtgccgcaccgcgcagattgtgacccagtattgcgtgggcgcgaactatacctggctgctggtggaaggcgtgtatctgcatagcctgctggtgctggtgggcggcagcgaagaaggccattttcgctattatctgctgctgggctggggcgcgccggcgctgtttgtgattccgtgggtgattgtgcgctatctgtatgaaaacacccagtgctgggaacgcaacgaagtgaaagcgatttggtggattattcgcaccccgattctgatgaccattctgattaactttctgatttttattcgcattctgggcattctgctgagcaaactgcgcacccgccagatgcgctgccgcgattatcgcctgcgcctggcgcgcagcaccctgaccctggtgccgctgctgggcgtgcatgaagtggtgtttgcgccggtgaccgaagaacaggcgcgcggcgcgctgcgctttgcgaaactgggctttgaaatttttctgagcagctttcagggctttctggtgagcgtgctgtattgctttattaacaaagaagtgggccgcgatccggcggcggcgccggcgctgtggcgccgccgcggcaccgcgccgccgctgagcgcgattgtgagccaggtgcagagcgaaattcgccgcggctggcatcattgccgcctgcgccgcagcctgggcgaagaacagcgccagctgccggaacgcgcgtttcgcgcgctgccgagcggcagcggcccgggcgaagtgccgaccagccgcggcctgagcagcggcaccctgccgggcccgggcaacgaagcgagccgcgaactggaaagctattgctaa

SEQ ID NO: 3147 - protein, 460 aa, Mus musculus
MPLRLLLLLLWLWGLQWAETDSEGQTTTGELYQRWEHYGQECQKMLETTEPPSGLACNGSFDMYACWNYTAANTTARVSCPWYLPWFRQVSAGFVFRQCGSDGQWGSWRDHTQCENPEKNGAFQDQTLILERLQIMYTVGYSLSLTTLLLALLILSLFRRLHCTRNYIHMNLFTSFMLRAAAILTRDQLLPPLGPYTGDQAPTPWNQALAACRTAQIMTQYCVGANYTWLLVEGVYLHHLLVIVGRSEKGHFRCYLLLGWGAPALFVIPWVIVRYLRENTQCWERNEVKAIWWIIRTPILITILINFLIFIRILGILVSKLRTRQMRCPDYRLRLARSTLTLVPLLGVHEVVFAPVTEEQVEGSLRFAKLAFEIFLSSFQGFLVSVLYCFINKEVQSEIRQGWRHRRLRLSLQEQRPRPHQELAPRAVPLSSACREAAVGNALPSGMLHVPGDEVLESYC

SEQ ID NO: 3148 - DNA, 1383 bp, Mus musculus
atgccgctgcgcctgctgctgctgctgctgtggctgtggggcctgcagtgggcggaaaccgatagcgaaggccagaccaccaccggcgaactgtatcagcgctgggaacattatggccaggaatgccagaaaatgctggaaaccaccgaaccgccgagcggcctggcgtgcaacggcagctttgatatgtatgcgtgctggaactataccgcggcgaacaccaccgcgcgcgtgagctgcccgtggtatctgccgtggtttcgccaggtgagcgcgggctttgtgtttcgccagtgcggcagcgatggccagtggggcagctggcgcgatcatacccagtgcgaaaacccggaaaaaaacggcgcgtttcaggatcagaccctgattctggaacgcctgcagattatgtataccgtgggctatagcctgagcctgaccaccctgctgctggcgctgctgattctgagcctgtttcgccgcctgcattgcacccgcaactatattcatatgaacctgtttaccagctttatgctgcgcgcggcggcgattctgacccgcgatcagctgctgccgccgctgggcccgtataccggcgatcaggcgccgaccccgtggaaccaggcgctggcggcgtgccgcaccgcgcagattatgacccagtattgcgtgggcgcgaactatacctggctgctggtggaaggcgtgtatctgcatcatctgctggtgattgtgggccgcagcgaaaaaggccattttcgctgctatctgctgctgggctggggcgcgccggcgctgtttgtgattccgtgggtgattgtgcgctatctgcgcgaaaacacccagtgctgggaacgcaacgaagtgaaagcgatttggtggattattcgcaccccgattctgattaccattctgattaactttctgatttttattcgcattctgggcattctggtgagcaaactgcgcacccgccagatgcgctgcccggattatcgcctgcgcctggcgcgcagcaccctgaccctggtgccgctgctgggcgtgcatgaagtggtgtttgcgccggtgaccgaagaacaggtggaaggcagcctgcgctttgcgaaactggcgtttgaaatttttctgagcagctttcagggctttctggtgagcgtgctgtattgctttattaacaaagaagtgcagagcgaaattcgccagggctggcgccatcgccgcctgcgcctgagcctgcaggaacagcgcccgcgcccgcatcaggaactggcgccgcgcgcggtgccgctgagcagcgcgtgccgcgaagcggcggtgggcaacgcgctgccgagcggcatgctgcatgtgccgggcgatgaagtgctggaaagctattgctaa

SEQ ID NO: 3149 - protein, 230 aa, Artificial Sequence
  source: /note="Description of Artificial Sequence: Synthetic polypeptide"
MPLRLLLLLLWLWGLQWAETDSEGQTTTGELYQRWEHYGQECQKMLETTEPPSGLACNGSFDMYACWNYTAANTTARVSCPWYLPWFRQVSAGFVFRQCGSDGQWGSWRDHTQCENPEKNGAFQDQTLILERLQIMYTVGYSLSLTTLLLALLILSLFRRLHCTRNYIHMNLFTSFMLRAAAILTRDQLLPPLGPYTGDQAPTPWNQVLHRLLPGGTKTFPIYFRTFPHH

SEQ ID NO: 3150 - DNA, 693 bp, Artificial Sequence
  source: /note="Description of Artificial Sequence: Synthetic polynucleotide"
atgccgctgcgcctgctgctgctgctgctgtggctgtggggcctgcagtgggcggaaaccgatagcgaaggccagaccaccaccggcgaactgtatcagcgctgggaacattatggccaggaatgccagaaaatgctggaaaccaccgaaccgccgagcggcctggcgtgcaacggcagctttgatatgtatgcgtgctggaactataccgcggcgaacaccaccgcgcgcgtgagctgcccgtggtatctgccgtggtttcgccaggtgagcgcgggctttgtgtttcgccagtgcggcagcgatggccagtggggcagctggcgcgatcatacccagtgcgaaaacccggaaaaaaacggcgcgtttcaggatcagaccctgattctggaacgcctgcagattatgtataccgtgggctatagcctgagcctgaccaccctgctgctggcgctgctgattctgagcctgtttcgccgcctgcattgcacccgcaactatattcatatgaacctgtttaccagctttatgctgcgcgcggcggcgattctgacccgcgatcagctgctgccgccgctgggcccgtataccggcgatcaggcgccgaccccgtggaaccaggtgctgcatcgcctgctgccgggcggcaccaaaacctttccgatttattttcgcacctttccgcatcattaa

SEQ ID NO: 3151 - protein, 42 aa, Homo sapiens
YAEGTFISDYSIAMDKIHQQDFVNWLLAQKGKKNDWKHNITQ

SEQ ID NO: 3152 - DNA, 126 bp, Homo sapiens
tatgcggaaggcacctttattagcgattatagcattgcgatggataaaattcatcagcaggattttgtgaactggctgctggcgcagaaaggcaaaaaaaacgattggaaacataacattacccag

SEQ ID NO: 3153 - protein, 42 aa, Mus musculus
YAEGTFISDYSIAMDKIRQQDFVNWLLAQRGKKSDWKHNITQ

SEQ ID NO: 3154 - DNA, 126 bp, Mus musculus
tatgcggaaggcacctttattagcgattatagcattgcgatggataaaattcgccagcaggattttgtgaactggctgctggcgcagcgcggcaaaaaaagcgattggaaacataacattacccag

SEQ ID NO: 3155 - protein, 42 aa, Rattus sp.
YAEGTFISDYSIAMDKIRQQDFVNWLLAQKGKKNDWKHNLTQ

SEQ ID NO: 3156 - DNA, 126 bp, Rattus sp.
tatgcggaaggcacctttattagcgattatagcattgcgatggataaaattcgccagcaggattttgtgaactggctgctggcgcagaaaggcaaaaaaaacgattggaaacataacctgacccag

SEQ ID NO: 3157 - protein, 22 aa, Homo sapiens
MDMRVPAQLLGLLLLWLRGARC

SEQ ID NO: 3158 - DNA, 66 bp, Homo sapiens
atggacatgagagtgcctgcacagctgctgggcctgctgctgctgtggctgagaggcgccagatgc

SEQ ID NO: 3159 - protein, 19 aa, Homo sapiens
MAWALLLLTLLTQGTGSWA

SEQ ID NO: 3160 - DNA, 57 bp, Homo sapiens
atggcctgggctctgctgctcctcaccctcctcactcagggcacagggtcctgggcc

SEQ ID NO: 3161 - protein, 239 aa, Artificial Sequence
  source: /note="Description of Artificial Sequence: Synthetic polypeptide"
MKLPVRLLVLMFWIPASSSDVVMTQTPLSLPVSLGDQASISCRSSQSLVHSNGDTYLHWYLQKPGQSPKLLIYKVSNRFSGVPDRFSGSGSGTDFTLKISRVEAADLGVYFCSQSTHVPPFTFGGGTKLEIKRADAAPTVSIFPPSSEQLTSGGASVVCFLNNFYPKDINVKWKIDGSERQNGVLNSWTDQDSKDSTYSMSSTLTLTKDEYERHNSYTCEATHKTSTSPIVKSFNRNEC

SEQ ID NO: 3162 - protein, 462 aa, Artificial Sequence
  source: /note="Description of Artificial Sequence: Synthetic polypeptide"
MGWSYIILFLVATATDVHSQVQLQQPGAELVKPGASVKLSCRASGYTFTSNWMHWVKQRPRQGLEWIGEINPSNGRSNYNEKFKTKATLTVDKSSSTAYMQLSSLTSEDSAVYYCARFYYGTSWFAYWGQGTLVAVSAAKTTPPSVYPLAPGSAAQTNSMVTLGCLVKGYFPEPVTVTWNSGSLSSGVHTFPAVLQSDLYTLSSSVTVPSSTWPSETVTCNVAHPASSTKVDKKIVPRDCGCKPCICTVPEVSSVFIFPPKPKDVLTITLTPKVTCVVVDISKDDPEVQFSWFVDDVEVHTAQTQPREEQFASTFRSVSELPIMHQDWLNGKEFKCRVNSAAFPAPIEKTISKTKGRPKAPQVYTIPPPKEQMAKDKVSLTCMITDFFPEDITVEWQWNGQPAENYKNTQPIMDTDGSYFVYSKLNVQKSNWEAGNTFTCSVLHEGLHNHHTEKSLSHSPGK

SEQ ID NO: 3163 - DNA, 321 bp, Artificial Sequence
  source: /note="Description of Artificial Sequence: Synthetic polynucleotide"
gaaatagtgatgacgcagtctccagccaccctgtctgtgtctccaggggaaagagccaccctctcctgcagggccagtcagagtgttgatagacacttagcctggtaccagcagaaacctggccaggctcccaggctcctcatctacgaagcagccaccagggccactggtatcccagccaggttcagtggcagtgggtctgggacagagttcactctcaccatcagcagcctgcagtctgaagattttgcagtttattactgtcagcagtatcagaactggcctctcactttcggcggagggaccaaggtggagatcaaa

SEQ ID NO: 3164 - protein, 107 aa, Artificial Sequence
  source: /note="Description of Artificial Sequence: Synthetic polypeptide"
EIVMTQSPATLSVSPGERATLSCRASQSVDRHLAWYQQKPGQAPRLLIYEAATRATGIPARFSGSGSGTEFTLTISSLQSEDFAVYYCQQYQNWPLTFGGGTKVEIK

SEQ ID NO: 3165 - DNA, 321 bp, Artificial Sequence
  source: /note="Description of Artificial Sequence: Synthetic polynucleotide"
gaaatagtgatgacgcagtctccagccaccctgtctgtgtctccaggggaaagagccaccctctcctgcagggccagtcagagtgttaacagacacttagcctggtaccagcagaaacctggccaggctcccaggctcctcatctacgaagcagccaccagggccactggtatcccagccaggttcagtggcagtgggtctgggacagagttcactctcaccatcagcagcctgcagtctgaagattttgcagtttattactgtcagcagtatcagaactggcctctcactttcggcggagggaccaaggtggagatcaaa

SEQ ID NO: 3166 - protein, 107 aa, Artificial Sequence
  source: /note="Description of Artificial Sequence: Synthetic polypeptide"
EIVMTQSPATLSVSPGERATLSCRASQSVNRHLAWYQQKPGQAPRLLIYEAATRATGIPARFSGSGSGTEFTLTISSLQSEDFAVYYCQQYQNWPLTFGGGTKVEIK

SEQ ID NO: 3167 - DNA, 321 bp, Artificial Sequence
  source: /note="Description of Artificial Sequence: Synthetic polynucleotide"
gaaatagtgatgacgcagtctccagccaccctgtctgtgtctccaggggaaagagccaccctctcctgcagggccagtcagagtgttcatagacacttagcctggtaccagcagaaacctggccaggctcccaggctcctcatctacgaagcagccaccagggccactggtatcccagccaggttcagtggcagtgggtctgggacagagttcactctcaccatcagcagcctgcagtctgaagattttgcagtttattactgtcagcagtatcagaactggcctctcactttcggcggagggaccaaggtggagatcaaa

SEQ ID NO: 3168 - protein, 107 aa, Artificial Sequence
  source: /note="Description of Artificial Sequence: Synthetic polypeptide"
EIVMTQSPATLSVSPGERATLSCRASQSVHRHLAWYQQKPGQAPRLLIYEAATRATGIPARFSGSGSGTEFTLTISSLQSEDFAVYYCQQYQNWPLTFGGGTKVEIK

SEQ ID NO: 3169 - DNA, 321 bp, Artificial Sequence
  source: /note="Description of Artificial Sequence: Synthetic polynucleotide"
gaaatagtgatgacgcagtctccagccaccctgtctgtgtctccaggggaaagagccaccctctcctgcagggccagtcagagtgttgaaagacacttagcctggtaccagcagaaacctggccaggctcccaggctcctcatctacgaagcagccaccagggccactggtatcccagccaggttcagtggcagtgggtctgggacagagttcactctcaccatcagcagcctgcagtctgaagattttgcagtttattactgtcagcagtatcagaactggcctctcactttcggcggagggaccaaggtggagatcaaa

SEQ ID NO: 3170 - protein, 107 aa, Artificial Sequence
  source: /note="Description of Artificial Sequence: Synthetic polypeptide"
EIVMTQSPATLSVSPGERATLSCRASQSVERHLAWYQQKPGQAPRLLIYEAATRATGIPARFSGSGSGTEFTLTISSLQSEDFAVYYCQQYQNWPLTFGGGTKVEIK

SEQ ID NO: 3171 - DNA, 321 bp, Artificial Sequence
  source: /note="Description of Artificial Sequence: Synthetic polynucleotide"
gaaatagtgatgacgcagtctccagccaccctgtctgtgtctccaggggaaagagccaccctctcctgcagggccagtcagagtgttttcagacacttagcctggtaccagcagaaacctggccaggctcccaggctcctcatctacgaagcagccaccagggccactggtatcccagccaggttcagtggcagtgggtctgggacagagttcactctcaccatcagcagcctgcagtctgaagattttgcagtttattactgtcagcagtatcagaactggcctctcactttcggcggagggaccaaggtggagatcaaa

SEQ ID NO: 3172 - protein, 107 aa, Artificial Sequence
  source: /note="Description of Artificial Sequence: Synthetic polypeptide"
EIVMTQSPATLSVSPGERATLSCRASQSVFRHLAWYQQKPGQAPRLLIYEAATRATGIPARFSGSGSGTEFTLTISSLQSEDFAVYYCQQYQNWPLTFGGGTKVEIK

SEQ ID NO: 3173 - DNA, 321 bp, Artificial Sequence
  source: /note="Description of Artificial Sequence: Synthetic polynucleotide"
gaaatagtgatgacgcagtctccagccaccctgtctgtgtctccaggggaaagagccaccctctcctgcagggccagtcagagtgttaacagacacttagcctggtaccagcagaaacctggccaggctcccaggctcctcatctacgaagcagccaccagggccactggtatcccagccagggtcagtggcagtgggtctgggacagagttcactctcaccatcagcagcctgcagtctgaagattttgcagtttattactgtcagcagtatcagaactggcctctcactttcggcggagggaccaaggtggagatcaaa

SEQ ID NO: 3174 - protein, 107 aa, Artificial Sequence
  source: /note="Description of Artificial Sequence: Synthetic polypeptide"
EIVMTQSPATLSVSPGERATLSCRASQSVNRHLAWYQQKPGQAPRLLIYEAATRATGIPARVSGSGSGTEFTLTISSLQSEDFAVYYCQQYQNWPLTFGGGTKVEIK

SEQ ID NO: 3175 - DNA, 321 bp, Artificial Sequence
  source: /note="Description of Artificial Sequence: Synthetic polynucleotide"
gaaatagtgatgacgcagtctccagccaccctgtctgtgtctccaggggaaagagccaccctctcctgcagggccagtcagagtgttgaaagacacttagcctggtaccagcagaaacctggccaggctcccaggctcctcatctacgaagcagccaccagggccactggtatcccagccagggtcagtggcagtgggtctgggacagagttcactctcaccatcagcagcctgcagtctgaagattttgcagtttattactgtcagcagtatcagaactggcctctcactttcggcggagggaccaaggtggagatcaaa

SEQ ID NO: 3176 - protein, 107 aa, Artificial Sequence
  source: /note="Description of Artificial Sequence: Synthetic polypeptide"
EIVMTQSPATLSVSPGERATLSCRASQSVERHLAWYQQKPGQAPRLLIYEAATRATGIPARVSGSGSGTEFTLTISSLQSEDFAVYYCQQYQNWPLTFGGGTKVEIK

SEQ ID NO: 3177 - DNA, 321 bp, Artificial Sequence
  source: /note="Description of Artificial Sequence: Synthetic polynucleotide"
gaaatagtgatgacgcagtctccagccaccctgtctgtgtctccaggggaaagagccaccctctcctgcagggccagtcagagtgttgatagacacttagcctggtaccagcagaaacctggccaggctcccaggctcctcatctacgaagcagccaccagggccactggtatcccagccagggtcagtggcagtgggtctgggacagagttcactctcaccatcagcagcctgcagtctgaagattttgcagtttattactgtcagcagtatcagaactggcctctcactttcggcggagggaccaaggtggagatcaaa

SEQ ID NO: 3178 - protein, 107 aa, Artificial Sequence
  source: /note="Description of Artificial Sequence: Synthetic polypeptide"
EIVMTQSPATLSVSPGERATLSCRASQSVDRHLAWYQQKPGQAPRLLIYEAATRATGIPARVSGSGSGTEFTLTISSLQSEDFAVYYCQQYQNWPLTFGGGTKVEIK

SEQ ID NO: 3179 - DNA, 321 bp, Artificial Sequence
  source: /note="Description of Artificial Sequence: Synthetic polynucleotide"
gaaatagtgatgacgcagtctccagccaccctgtctgtgtctccaggggaaagagccaccctctcctgcagggccagtcagagtgttctgagtcacttagcctggtaccagcagaaacctggccaggctcccaggctcctcatctacgaagcagccaccagggccactggtatcccagccaggttcagtggcagtgggtctgggacagagttcactctcaccatcagcagcctgcagtctgaagattttgcagtttattactgtcagcagtataacaactggcctctcactttcggcggagggaccaaggtggagatcaaa

SEQ ID NO: 3180 - protein, 107 aa, Artificial Sequence
  source: /note="Description of Artificial Sequence: Synthetic polypeptide"
EIVMTQSPATLSVSPGERATLSCRASQSVLSHLAWYQQKPGQAPRLLIYEAATRATGIPARFSGSGSGTEFTLTISSLQSEDFAVYYCQQYNNWPLTFGGGTKVEIK

SEQ ID NO: 3181 - DNA, 321 bp, Artificial Sequence
  source: /note="Description of Artificial Sequence: Synthetic polynucleotide"
gaaatagtgatgacgcagtctccagccaccctgtctgtgtctccaggggaaagagccaccctctcctgcagggccagtcagagtgttctgagtcacttagcctggtaccagcagaaacctggccaggctcccaggctcctcatctacgaagcagccaccagggccactggtatcccagccaggttcagtggcagtgggtctgggacagagttcactctcaccatcagcagcctgcagtctgaagattttgcagtttattactgtcagcagtatcagaactggcctctcactttcggcggagggaccaaggtggagatcaaa

SEQ ID NO: 3182 - protein, 107 aa, Artificial Sequence
  source: /note="Description of Artificial Sequence: Synthetic polypeptide"
EIVMTQSPATLSVSPGERATLSCRASQSVLSHLAWYQQKPGQAPRLLIYEAATRATGIPARFSGSGSGTEFTLTISSLQSEDFAVYYCQQYQNWPLTFGGGTKVEIK

SEQ ID NO: 3183 - DNA, 321 bp, Artificial Sequence
  source: /note="Description of Artificial Sequence: Synthetic polynucleotide"
gaaatagtgatgacgcagtctccagccaccctgtctgtgtctccaggggaaagagccaccctctcctgcagggccagtcagagtgttatgagtcacttagcctggtaccagcagaaacctggccaggctcccaggctcctcatctacgaagcagccaccagggccactggtatcccagccaggttcagtggcagtgggtctgggacagagttcactctcaccatcagcagcctgcagtctgaagattttgcagtttattactgtcagcagtatcagaactggcctctcactttcggcggagggaccaaggtggagatcaaa

SEQ ID NO: 3184 - protein, 107 aa, Artificial Sequence
  source: /note="Description of Artificial Sequence: Synthetic polypeptide"
EIVMTQSPATLSVSPGERATLSCRASQSVMSHLAWYQQKPGQAPRLLIYEAATRATGIPARFSGSGSGTEFTLTISSLQSEDFAVYYCQQYQNWPLTFGGGTKVEIK

SEQ ID NO: 3185 - DNA, 321 bp, Artificial Sequence
  source: /note="Description of Artificial Sequence: Synthetic polynucleotide"
gaaatagtgatgacgcagtctccagccaccctgtctgtgtctccaggggaaagagccaccctctcctgcagggccagtcagagtgttctgacgcacttagcctggtaccagcagaaacctggccaggctcccaggctcctcatctacgaagcagccaccagggccactggtatcccagccaggttcagtggcagtgggtctgggacagagttcactctcaccatcagcagcctgcagtctgaagattttgcagtttattactgtcagcagtatcagaactggcctctcactttcggcggagggaccaaggtggagatcaaa

SEQ ID NO: 3186 - protein, 107 aa, Artificial Sequence
  source: /note="Description of Artificial Sequence: Synthetic polypeptide"
EIVMTQSPATLSVSPGERATLSCRASQSVLTHLAWYQQKPGQAPRLLIYEAATRATGIPARFSGSGSGTEFTLTISSLQSEDFAVYYCQQYQNWPLTFGGGTKVEIK

SEQ ID NO: 3187 - DNA, 321 bp, Artificial Sequence
  source: /note="Description of Artificial Sequence: Synthetic polynucleotide"
gaaatagtgatgacgcagtctccagccaccctgtctgtgtctccaggggaaagagccaccctctcctgcagggccagtcagagtgttgatctgcacttagcctggtaccagcagaaacctggccaggctcccaggctcctcatctacgaagcagccaccagggccactggtatcccagccaggttcagtggcagtgggtctgggacagagttcactctcaccatcagcagcctgcagtctgaagattttgcagtttattactgtcagcagtatcagaactggcctctcactttcggcggagggaccaaggtggagatcaaa

SEQ ID NO: 3188 - protein, 107 aa, Artificial Sequence
  source: /note="Description of Artificial Sequence: Synthetic polypeptide"
EIVMTQSPATLSVSPGERATLSCRASQSVDLHLAWYQQKPGQAPRLLIYEAATRATGIPARFSGSGSGTEFTLTISSLQSEDFAVYYCQQYQNWPLTFGGGTKVEIK

SEQ ID NO: 3189 - DNA, 321 bp, Artificial Sequence
  source: /note="Description of Artificial Sequence: Synthetic polynucleotide"
gaaatagtgatgacgcagtctccagccaccctgtctgtgtctccaggggaaagagccaccctctcctgcagggccagtcagagtgttagcgaacacttagcctggtaccagcagaaacctggccaggctcccaggctcctcatctacgaagcagccaccagggccactggtatcccagccaggttcagtggcagtgggtctgggacagagttcactctcaccatcagcagcctgcagtctgaagattttgcagtttattactgtcagcagtatcagaactggcctctcactttcggcggagggaccaaggtggagatcaaa

SEQ ID NO: 3190 - protein, 107 aa, Artificial Sequence
  source: /note="Description of Artificial Sequence: Synthetic polypeptide"
EIVMTQSPATLSVSPGERATLSCRASQSVSEHLAWYQQKPGQAPRLLIYEAATRATGIPARFSGSGSGTEFTLTISSLQSEDFAVYYCQQYQNWPLTFGGGTKVEIK

SEQ ID NO: 3191 - DNA, 321 bp, Artificial Sequence; identical to SEQ ID NO: 3189
  source: /note="Description of Artificial Sequence: Synthetic polynucleotide"

SEQ ID NO: 3192 - protein, 107 aa, Artificial Sequence; identical to SEQ ID NO: 3190
  source: /note="Description of Artificial Sequence: Synthetic polypeptide"

SEQ ID NO: 3193 - DNA, 321 bp, Artificial Sequence
  source: /note="Description of Artificial Sequence: Synthetic polynucleotide"
gaaatagtgatgacgcagtctccagccaccctgtctgtgtctccaggggaaagagccaccctctcctgcagggccagtcagagtgttagccggcacttagcctggtaccagcagaaacctggccaggctcccaggctcctcatctacgaagcagccaccagggccactggtatcccagccaggttcagtggcagtgggtctgggacagagttcactctcaccatcagcagcctgcagtctgaagattttgcagtttattactgtcagcagtatcagcactggcctctcactttcggcggagggaccaaggtggagatcaaa

SEQ ID NO: 3194 - protein, 107 aa, Artificial Sequence
  source: /note="Description of Artificial Sequence: Synthetic polypeptide"
EIVMTQSPATLSVSPGERATLSCRASQSVSRHLAWYQQKPGQAPRLLIYEAATRATGIPARFSGSGSGTEFTLTISSLQSEDFAVYYCQQYQHWPLTFGGGTKVEIK

SEQ ID NO: 3195 - DNA, 321 bp, Artificial Sequence
  source: /note="Description of Artificial Sequence: Synthetic polynucleotide"
gaaatagtgatgacgcagtctccagccaccctgtctgtgtctccaggggaaagagccaccctctcctgcagggccagtcagagtgttttcagccacttagcctggtaccagcagaaacctggccaggctcccaggctcctcatctacgaagcagccaccagggccactggtatcccagccaggttcagtggcagtgggtctgggacagagttcactctcaccatcagcagcctgcagtctgaagattttgcagtttattactgtcagcagtatcagaactggcctctcactttcggcggagggaccaaggtggagatcaaa

SEQ ID NO: 3196 - protein, 107 aa, Artificial Sequence
  source: /note="Description of Artificial Sequence: Synthetic polypeptide"
EIVMTQSPATLSVSPGERATLSCRASQSVFSHLAWYQQKPGQAPRLLIYEAATRATGIPARFSGSGSGTEFTLTISSLQSEDFAVYYCQQYQNWPLTFGGGTKVEIK

SEQ ID NO: 3197 - DNA, 321 bp, Artificial Sequence
  source: /note="Description of Artificial Sequence: Synthetic polynucleotide"
gaaatagtgatgacgcagtctccagccaccctgtctgtgtctccaggggaaagagccaccctctcctgcagggccagtcagagtgttttcagccacttagcctggtaccagcagaaacctggccaggctcccaggctcctcatctacgaagcagccaccagggccactggtatcccagccagggtcagtggcagtgggtctgggacagagttcactctcaccatcagcagcctgcagtctgaagattttgcagtttattactgtcagcagtatcagaactggcctctcactttcggcggagggaccaaggtggagatcaaa

SEQ ID NO: 3198 - protein, 107 aa, Artificial Sequence
  source: /note="Description of Artificial Sequence: Synthetic polypeptide"
EIVMTQSPATLSVSPGERATLSCRASQSVFSHLAWYQQKPGQAPRLLIYEAATRATGIPARVSGSGSGTEFTLTISSLQSEDFAVYYCQQYQNWPLTFGGGTKVEIK

SEQ ID NO: 3199 - DNA, 321 bp, Artificial Sequence
  source: /note="Description of Artificial Sequence: Synthetic polynucleotide"
gaaatagtgatgacgcagtctccagccaccctgtctgtgtctccaggggaaagagccaccctctcctgcagggccagtcagagtgttctgagtcacttagcctggtaccagcagaaacctggccaggctcccaggctcctcatctacgaagcagccaccagggccactggtatcccagccaggttcagtggcagtgggtctgggacagagttcactctcaccatcagcagcctgcagtctgaagattttgcagtttattactgtcagcagtatcagcagtggcctctcactttcggcggagggaccaaggtggagatcaaa

SEQ ID NO: 3200 - protein, 107 aa, Artificial Sequence
  source: /note="Description of Artificial Sequence: Synthetic polypeptide"
EIVMTQSPATLSVSPGERATLSCRASQSVLSHLAWYQQKPGQAPRLLIYEAATRATGIPARFSGSGSGTEFTLTISSLQSEDFAVYYCQQYQQWPLTFGGGTKVEIK

SEQ ID NO: 3201 - DNA, 321 bp, Artificial Sequence
  source: /note="Description of Artificial Sequence: Synthetic polynucleotide"
gaaatagtgatgacgcagtctccagccaccctgtctgtgtctccaggggaaagagccaccctctcctgcagggccagtcagagtgttttcagccacttagcctggtaccagcagaaacctggccaggctcccaggctcctcatctacgaagcagccaccagggccactggtatcccagccaggttcagtggcagtgggtctgggacagagttcactctcaccatcagcagcctgcagtctgaagattttgcagtttattactgtcagcagtatcagcagtggcctctcactttcggcggagggaccaaggtggagatcaaa

SEQ ID NO: 3202 - protein, 107 aa, Artificial Sequence
  source: /note="Description of Artificial Sequence: Synthetic polypeptide"
EIVMTQSPATLSVSPGERATLSCRASQSVFSHLAWYQQKPGQAPRLLIYEAATRATGIPARFSGSGSGTEFTLTISSLQSEDFAVYYCQQYQQWPLTFGGGTKVEIK

SEQ ID NO: 3203 - DNA, 321 bp, Artificial Sequence
  source: /note="Description of Artificial Sequence: Synthetic polynucleotide"
gaaatagtgatgacgcagtctccagccaccctgtctgtgtctccaggggaaagagccaccctctcctgcagggccagtcagagtgttttcagccacttagcctggtaccagcagaaacctggccaggctcccaggctcctcatctacgaagcagccaccagggccactggtatcccagccagggtcagtggcagtgggtctgggacagagttcactctcaccatcagcagcctgcagtctgaagattttgcagtttattactgtcagcagtatcagcagtggcctctcactttcggcggagggaccaaggtggagatcaaa

SEQ ID NO: 3204 - protein, 107 aa, Artificial Sequence
  source: /note="Description of Artificial Sequence: Synthetic polypeptide"
EIVMTQSPATLSVSPGERATLSCRASQSVFSHLAWYQQKPGQAPRLLIYEAATRATGIPARVSGSGSGTEFTLTISSLQSEDFAVYYCQQYQQWPLTFGGGTKVEIK

SEQ ID NO: 3205 - DNA, 321 bp, Artificial Sequence
  source: /note="Description of Artificial Sequence: Synthetic polynucleotide"
gaaatagtgatgacgcagtctccagccaccctgtctgtgtctccaggggaaagagccaccctctcctgcagggccagtcagagtgttcagagccacttagcctggtaccagcagaaacctggccaggctcccaggctcctcatctacgaagcagccaccagggccactggtatcccagccaggttcagtggcagtgggtctgggacagagttcactctcaccatcagcagcctgcagtctgaagattttgcagtttattactgtcagcagtatcagaactggcctctcactttcggcggagggaccaaggtggagatcaaa

SEQ ID NO: 3206 - protein, 107 aa, Artificial Sequence
  source: /note="Description of Artificial Sequence: Synthetic polypeptide"
EIVMTQSPATLSVSPGERATLSCRASQSVQSHLAWYQQKPGQAPRLLIYEAATRATGIPARFSGSGSGTEFTLTISSLQSEDFAVYYCQQYQNWPLTFGGGTKVEIK

SEQ ID NO: 3207 - DNA, 321 bp, Artificial Sequence
  source: /note="Description of Artificial Sequence: Synthetic polynucleotide"
gaaatagtgatgacgcagtctccagccaccctgtctgtgtctccaggggaaagagccaccctctcctgcagggccagtcagagtgttagtagccacttagcctggtaccagcagaaacctggccaggctcccaggctcctcatctacgaagcagccaccagggccactggtatcccagccaggttcagtggcagtgggtctgggacagagttcactctcaccatcagcagcctgcagtctgaagattttgcagtttattactgtcagcagtatcagcagtggcctctcactttcggcggagggaccaaggtggagatcaaa

SEQ ID NO: 3208 - protein, 107 aa, Artificial Sequence
  source: /note="Description of Artificial Sequence: Synthetic polypeptide"
EIVMTQSPATLSVSPGERATLSCRASQSVSSHLAWYQQKPGQAPRLLIYEAATRATGIPARFSGSGSGTEFTLTISSLQSEDFAVYYCQQYQQWPLTFGGGTKVEIK

SEQ ID NO: 3209 - DNA, 321 bp, Artificial Sequence
  source: /note="Description of Artificial Sequence: Synthetic polynucleotide"
gaaatagtgatgacgcagtctccagccaccctgtctgtgtctccaggggaaagagccaccctctcctgcagggccagtcagagtgttttcacgcacttagcctggtaccagcagaaacctggccaggctcccaggctcctcatctacgaagcagccaccagggccactggtatcccagccaggttcagtggcagtgggtctgggacagagttcactctcaccatcagcagcctgcagtctgaagattttgcagtttattactgtcagcagtataacaactggcctctcactttcggcggagggaccaaggtggagatcaaa

SEQ ID NO: 3210 - protein, 107 aa, Artificial Sequence
  source: /note="Description of Artificial Sequence: Synthetic polypeptide"
EIVMTQSPATLSVSPGERATLSCRASQSVFTHLAWYQQKPGQAPRLLIYEAATRATGIPARFSGSGSGTEFTLTISSLQSEDFAVYYCQQYNNWPLTFGGGTKVEIK

SEQ ID NO: 3211 - DNA, 321 bp, Artificial Sequence
  source: /note="Description of Artificial Sequence: Synthetic polynucleotide"
gaaatagtgatgacgcagtctccagccaccctgtctgtgtctccaggggaaagagccaccctctcctgcagggccagtcagagtgttttcacgcacttagcctggtaccagcagaaacctggccaggctcccaggctcctcatctacgaagcagccaccagggccactggtatcccagccagggtcagtggcagtgggtctgggacagagttcactctcaccatcagcagcctgcagtctgaagattttgcagtttattactgtcagcagtataacaactggcctctcactttcggcggagggaccaaggtggagatcaaa

SEQ ID NO: 3212 - protein, 107 aa, Artificial Sequence
  source: /note="Description of Artificial Sequence: Synthetic polypeptide"
EIVMTQSPATLSVSPGERATLSCRASQSVFTHLAWYQQKPGQAPRLLIYEAATRATGIPARVSGSGSGTEFTLTISSLQSEDFAVYYCQQYNNWPLTFGGGTKVEIK

SEQ ID NO: 3213 - DNA, 321 bp, Artificial Sequence
  source: /note="Description of Artificial Sequence: Synthetic polynucleotide"
gaaatagtgatgacgcagtctccagccaccctgtctgtgtctccaggggaaagagccaccctctcctgcagggccagtcagagtgtttttgaacacttagcctggtaccagcagaaacctggccaggctcccaggctcctcatctacgaagcagccaccagggccactggtatcccagccaggttcagtggcagtgggtctgggacagagttcactctcaccatcagcagcctgcagtctgaagattttgcagtttattactgtcagcagtataacaactggcctctcactttcggcggagggaccaaggtggagatcaaa

SEQ ID NO: 3214 - protein, 107 aa, Artificial Sequence
  source: /note="Description of Artificial Sequence: Synthetic polypeptide"
EIVMTQSPATLSVSPGERATLSCRASQSVFEHLAWYQQKPGQAPRLLIYEAATRATGIPARFSGSGSGTEFTLTISSLQSEDFAVYYCQQYNNWPLTFGGGTKVEIK

SEQ ID NO: 3215 - DNA, 321 bp, Artificial Sequence
  source: /note="Description of Artificial Sequence: Synthetic polynucleotide"
gaaatagtgatgacgcagtctccagccaccctgtctgtgtctccaggggaaagagccaccctctcctgcagggccagtcagagtgttgaacagcacttagcctggtaccagcagaaacctggccaggctcccaggctcctcatctacgaagcagccaccagggccactggtatcccagccaggttcagtggcagtgggtctgggacagagttcactctcaccatcagcagcctgcagtctgaagattttgcagtttattactgtcagcagtataacaactggcctctcactttcggcggagggaccaaggtggagatcaaa

SEQ ID NO: 3216 - protein, 107 aa, Artificial Sequence
  source: /note="Description of Artificial Sequence: Synthetic polypeptide"
EIVMTQSPATLSVSPGERATLSCRASQSVEQHLAWYQQKPGQAPRLLIYEAATRATGIPARFSGSGSGTEFTLTISSLQSEDFAVYYCQQYNNWPLTFGGGTKVEIK

SEQ ID NO: 3217 - DNA, 321 bp, Artificial Sequence
  source: /note="Description of Artificial Sequence: Synthetic polynucleotide"
gaaatagtgatgacgcagtctccggccaccctgtctgtgtctccaggggaaagagccaccctctcctgcagggccagtcagagtgttcatagccacttagcctggtaccagcagaaacctggccaggctcccaggctcctcatctacgaagcagccaccagggccactggtatcccagccaggttcagtggcagtgggtctgggacagagttcactctcaccatcagcagcctgcagtctgaagattttgcagtttattactgtcagcagtataaccagtggcctctcactttcggcggagggaccaaggtggagatcaaa

SEQ ID NO: 3218 - protein, 107 aa, Artificial Sequence
  source: /note="Description of Artificial Sequence: Synthetic polypeptide"
EIVMTQSPATLSVSPGERATLSCRASQSVHSHLAWYQQKPGQAPRLLIYEAATRATGIPARFSGSGSGTEFTLTISSLQSEDFAVYYCQQYNQWPLTFGGGTKVEIK

SEQ ID NO: 3219 - DNA, 321 bp, Artificial Sequence
  source: /note="Description of Artificial Sequence: Synthetic polynucleotide"
gaaatagtgatgacgcagtctccagccaccctgtctgtgtctccaggggaaagagccaccctctcctgcagggccagtcagagtgttcatcatcacttagcctggtaccagcagaaacctggccaggctcccaggctcctcatctacgaagcagccaccagggccactggtatcccagccaggttcagtggcagtgggtctgggacagagttcactctcaccatcagcagcctgcagtctgaagattttgcagtttattactgtcagcagtataaccagtggcctctcactttcggcggagggaccaaggtggagatcaaa

SEQ ID NO: 3220 - protein, 107 aa, Artificial Sequence
  source: /note="Description of Artificial Sequence: Synthetic polypeptide"
EIVMTQSPATLSVSPGERATLSCRASQSVHHHLAWYQQKPGQAPRLLIYEAATRATGIPARFSGSGSGTEFTLTISSLQSEDFAVYYCQQYNQWPLTFGGGTKVEIK

SEQ ID NO: 3221 - DNA, 321 bp, Artificial Sequence
  source: /note="Description of Artificial Sequence: Synthetic polynucleotide"
gaaatagtgatgacgcagtctccagccaccctgtctgtgtctccaggggaaagagccaccctctcctgcagggccagtcagagtgttcatagccacttagcctggtaccagcagaaacctggccaggctcccaggctcctcatctacgaagcagccaccagggccactggtatcccagccaggttcagtggcagtgggtctgggacagagttcactctcaccatcagcagcctgcagtctgaagattttgcagtttattactgtcagcagtataacaactggcctctcactttcggcggagggaccaaggtggagatcaaa

SEQ ID NO: 3222 - protein, 107 aa, Artificial Sequence
  source: /note="Description of Artificial Sequence: Synthetic polypeptide"
EIVMTQSPATLSVSPGERATLSCRASQSVHSHLAWYQQKPGQAPRLLIYEAATRATGIPARFSGSGSGTEFTLTISSLQSEDFAVYYCQQYNNWPLTFGGGTKVEIK

SEQ ID NO: 3223 - DNA, 321 bp, Artificial Sequence
  source: /note="Description of Artificial Sequence: Synthetic polynucleotide"
gaaatagtgatgacgcagtctccagccaccctgtctgtgtctccaggggaaagagccaccctctcctgcagggccagtcagagtgttgatgtcaacttagcctggtaccagcagaaacctggccaggctcccaggctcctcatctacgaagcagccaccagggccactggtatcccagccaggttcagtggcagtgggtctgggacagagttcactctcaccatcagcagcctgcagtctgaagattttgcagtttattactgtcagcagtataaccagtggcctctcactttcggcggagggaccaaggtggagatcaaa

SEQ ID NO: 3224 - protein, 107 aa, Artificial Sequence
  source: /note="Description of Artificial Sequence: Synthetic polypeptide"
EIVMTQSPATLSVSPGERATLSCRASQSVDVNLAWYQQKPGQAPRLLIYEAATRATGIPARFSGSGSGTEFTLTISSLQSEDFAVYYCQQYNQWPLTFGGGTKVEIK

SEQ ID NO: 3225 - DNA, 321 bp, Artificial Sequence
  source: /note="Description of Artificial Sequence: Synthetic polynucleotide"
gaaatagtgatgacgcagtctccagccaccctgtctgtgtctccaggggaaagagccaccctctcctgcagggccagtcagagtgttgatgtccacttagcctggtaccagcagaaacctggccaggctcccaggctcctcatctacgaagcagccaccagggccactggtatcccagccaggttcagtggcagtgggtctgggacagagttcactctcaccatcagcagcctgcagtctgaagattttgcagtttattactgtcagcagtataaccagtggcctctcactttcggcggagggaccaaggtggagatcaaa

SEQ ID NO: 3226 - protein, 107 aa, Artificial Sequence
  source: /note="Description of Artificial Sequence: Synthetic polypeptide"
EIVMTQSPATLSVSPGERATLSCRASQSVDVHLAWYQQKPGQAPRLLIYEAATRATGIPARFSGSGSGTEFTLTISSLQSEDFAVYYCQQYNQWPLTFGGGTKVEIK

SEQ ID NO: 3227 - DNA, 321 bp, Artificial Sequence; identical to SEQ ID NO: 3213
  source: /note="Description of Artificial Sequence: Synthetic polynucleotide"

SEQ ID NO: 3228 - protein, 107 aa, Artificial Sequence; identical to SEQ ID NO: 3214
  source: /note="Description of Artificial Sequence: Synthetic polypeptide"

SEQ ID NO: 3229 - DNA, 321 bp, Artificial Sequence
  source: /note="Description of Artificial Sequence: Synthetic polynucleotide"
gaaatagtgatgacgcagtctccagccaccctgtctgtgtctccaggggaaagagccaccctctcctgcagggccagtcagagtgtttttgaacacttagcctggtaccagcagaaacctggccaggctcccaggctcctcatctacgaagcagccaccagggccactggtatcccagccagggtcagtggcagtgggtctgggacagagttcactctcaccatcagcagcctgcagtctgaagattttgcagtttattactgtcagcagtataacaactggcctctcactttcggcggagggaccaaggtggagatcaaa

SEQ ID NO: 3230 - protein, 107 aa, Artificial Sequence
  source: /note="Description of Artificial Sequence: Synthetic polypeptide"
EIVMTQSPATLSVSPGERATLSCRASQSVFEHLAWYQQKPGQAPRLLIYEAATRATGIPARVSGSGSGTEFTLTISSLQSEDFAVYYCQQYNNWPLTFGGGTKVEIK

SEQ ID NO: 3231 - DNA, 321 bp, Artificial Sequence
  source: /note="Description of Artificial Sequence: Synthetic polynucleotide"
gaaatagtgatgacgcagtctccagccaccctgtctgtgtctccaggggaaagagccaccctctcctgcagggccagtcagagtgttttcgaacacttagcctggtaccagcagaaacctggccaggctcccaggctcctcatctacgaagcagccaccagggccactggtatcccagccaggttcagtggcagtgggtctgggacagagttcactctcaccatcagcagcctgcagtctgaagattttgcagtttattactgtcagcagtataaccagtggcctctcactttcggcggagggaccaaggtggagatcaaa

SEQ ID NO: 3232 - protein, 107 aa, Artificial Sequence
  source: /note="Description of Artificial Sequence: Synthetic polypeptide"
EIVMTQSPATLSVSPGERATLSCRASQSVFEHLAWYQQKPGQAPRLLIYEAATRATGIPARFSGSGSGTEFTLTISSLQSEDFAVYYCQQYNQWPLTFGGGTKVEIK

SEQ ID NO: 3233 - DNA, 321 bp, Artificial Sequence
  source: /note="Description of Artificial Sequence: Synthetic polynucleotide"
gaaatagtgatgacgcagtctccagccaccctgtctgtgtctccaggggaaagagccaccctctcctgcagggccagtcagagtgttctggaacacttagcctggtaccagcagaaacctggccaggctcccaggctcctcatctacgaagcagccaccagggccactggtatcccagccaggttcagtggcagtgggtctgggacagagttcactctcaccatcagcagcctgcagtctgaagattttgcagtttattactgtcagcagtataacaactggcctctcactttcggcggagggaccaaggtggagatcaaa

SEQ ID NO: 3234 - protein, 107 aa, Artificial Sequence
  source: /note="Description of Artificial Sequence: Synthetic polypeptide"
EIVMTQSPATLSVSPGERATLSCRASQSVLEHLAWYQQKPGQAPRLLIYEAATRATGIPARFSGSGSGTEFTLTISSLQSEDFAVYYCQQYNNWPLTFGGGTKVEIK

SEQ ID NO: 3235 - DNA, 321 bp, Artificial Sequence
  source: /note="Description of Artificial Sequence: Synthetic polynucleotide"
gaaatagtgatgacgcagtctccagccaccctgtctgtgtctccaggggaaagagccaccctctcctgcagggccagtcagagtgttgatagacacttagcctggtaccagcagaaacctggccaggctcccaggctcctcatctacgaagcagccaccagggccactggtatcccagccaggttcagtggcagtgggtctgggacagagttcactctcaccatcagcagcctgcagtctgaagattttgcagtttattactgtcagcagtataaccagtggcctctcactttcggcggagggaccaaggtggagatcaaa

SEQ ID NO: 3236 - protein, 107 aa, Artificial Sequence
  source: /note="Description of Artificial Sequence: Synthetic polypeptide"
EIVMTQSPATLSVSPGERATLSCRASQSVDRHLAWYQQKPGQAPRLLIYEAATRATGIPARFSGSGSGTEFTLTISSLQSEDFAVYYCQQYNQWPLTFGGGTKVEIK

SEQ ID NO: 3237 - DNA, 321 bp, Artificial Sequence
  source: /note="Description of Artificial Sequence: Synthetic polynucleotide"
gaaatagtgatgacgcagtctccagccaccctgtctgtgtctccaggggaaagagccaccctctcctgcagggccagtcagagtgttaaccggcacttagcctggtaccagcagaaacctggccaggctcccaggctcctcatctacgaagcagccaccagggccactggtatcccagccaggttcagtggcagtgggtctgggacagagttcactctcaccatcagcagcctgcagtctgaagattttgcagtttattactgtcagcagtatcagcagtggcctctcactttcggcggagggaccaaggtggagatcaaa

SEQ ID NO: 3238 - protein, 107 aa, Artificial Sequence
  source: /note="Description of Artificial Sequence: Synthetic polypeptide"
EIVMTQSPATLSVSPGERATLSCRASQSVNRHLAWYQQKPGQAPRLLIYEAATRATGIPARFSGSGSGTEFTLTISSLQSEDFAVYYCQQYQQWPLTFGGGTKVEIK

SEQ ID NO: 3239 - DNA, 321 bp, Artificial Sequence
  source: /note="Description of Artificial Sequence: Synthetic polynucleotide"
gaaatagtgatgacgcagtctccagccaccctgtctgtgtctccaggggaaagagccaccctctcctgcagggccagtcagagtgttaacgtacacttagcctggtaccagcagaaacctggccaggctcccaggctcctcatctaccaggcagccaccagggccactggtatcccagccaggttcagtggcagtgggtctgggacagagttcactctcaccatcagcagcctgcagtctgaagattttgcagtttattactgtcagcagtataaccagtggcctctcactttcggcggagggaccaaggtggagatcaaa

SEQ ID NO: 3240 - protein, 107 aa, Artificial Sequence
  source: /note="Description of Artificial Sequence: Synthetic polypeptide"
EIVMTQSPATLSVSPGERATLSCRASQSVNVHLAWYQQKPGQAPRLLIYQAATRATGIPARFSGSGSGTEFTLTISSLQSEDFAVYYCQQYNQWPLTFGGGTKVEIK

SEQ ID NO: 3241 - DNA, 321 bp, Artificial Sequence; identical to SEQ ID NO: 3185
  source: /note="Description of Artificial Sequence: Synthetic polynucleotide"

SEQ ID NO: 3242 - protein, 107 aa, Artificial Sequence; identical to SEQ ID NO: 3186
  source: /note="Description of Artificial Sequence: Synthetic polypeptide"

SEQ ID NO: 3243 - DNA, 321 bp, Artificial Sequence
  source: /note="Description of Artificial Sequence: Synthetic polynucleotide"
gaaatagtgatgacgcagtctccagccaccctgtctgtgtctccaggggaaagagccaccctctcctgcagggccagtcagagtgttctgacgcacttagcctggtaccagcagaaacctggccaggctcccaggctcctcatctacgaagcagccaccagggccactggtatcccagccagggtcagtggcagtgggtctgggacagagttcactctcaccatcagcagcctgcagtctgaagattttgcagtttattactgtcagcagtatcagaactggcctctcactttcggcggagggaccaaggtggagatcaaa

SEQ ID NO: 3244 - protein, 107 aa, Artificial Sequence
  source: /note="Description of Artificial Sequence: Synthetic polypeptide"
EIVMTQSPATLSVSPGERATLSCRASQSVLTHLAWYQQKPGQAPRLLIYEAATRATGIPARVSGSGSGTEFTLTISSLQSEDFAVYYCQQYQNWPLTFGGGTKVEIK

SEQ ID NO: 3245 - DNA, 321 bp, Artificial Sequence
  source: /note="Description of Artificial Sequence: Synthetic polynucleotide"
gaaatagtgatgacgcagtctccagccaccctgtctgtgtctccaggggaaagagccaccctctcctgcagggccagtcagagtgttagcagcaacttagcctggtaccagcagaaacctggccaggctcccaggctcctcatctatggtgcagccaccagggccactggtatcccagccaggttcagtggcagtgggtctgggacagagttcactctcaccatcagcagcctgcagtctgaagattttgcagtttattactgtcagcagtataataactggcctctcactttcggcggagggaccaaggtggagatcaaa

SEQ ID NO: 3246 - protein, 107 aa, Artificial Sequence
  source: /note="Description of Artificial Sequence: Synthetic polypeptide"
EIVMTQSPATLSVSPGERATLSCRASQSVSSNLAWYQQKPGQAPRLLIYGAATRATGIPARFSGSGSGTEFTLTISSLQSEDFAVYYCQQYNNWPLTFGGGTKVEIK

SEQ ID NO: 3247 - DNA, 321 bp, Artificial Sequence; identical to SEQ ID NO: 3245
  source: /note="Description of Artificial Sequence: Synthetic polynucleotide"

SEQ ID NO: 3248 - protein, 107 aa, Artificial Sequence; identical to SEQ ID NO: 3246
  source: /note="Description of Artificial Sequence: Synthetic polypeptide"

SEQ ID NO: 3249 - DNA, 321 bp, Artificial Sequence; identical to SEQ ID NO: 3245
  source: /note="Description of Artificial Sequence: Synthetic polynucleotide"

SEQ ID NO: 3250 - protein, 107 aa, Artificial Sequence; identical to SEQ ID NO: 3246
  source: /note="Description of Artificial Sequence: Synthetic polypeptide"

SEQ ID NO: 3251 - DNA, 321 bp, Artificial Sequence
  source: /note="Description of Artificial Sequence: Synthetic polynucleotide"
gaaatagtgatgacgcagtctccagccaccctgtctgtgtctccaggggaaagagccaccctctcctgcagggccagtcagagtgttagcagcaacttagcctggtaccagcagaaacctggccaggctcccaggctcctcatctatggtgcagccaccagggccactggtatcccagccagggtcagtggcagtgggtctgggacagagttcactctcaccatcagcagcctgcagtctgaagattttgcagtttattactgtcagcagtataataactggcctctcactttcggcggagggaccaaggtggagatcaaa

SEQ ID NO: 3252 - protein, 107 aa, Artificial Sequence
  source: /note="Description of Artificial Sequence: Synthetic polypeptide"
EIVMTQSPATLSVSPGERATLSCRASQSVSSNLAWYQQKPGQAPRLLIYGAATRATGIPARVSGSGSGTEFTLTISSLQSEDFAVYYCQQYNNWPLTFGGGTKVEIK

SEQ ID NO: 3253 - DNA, 321 bp, Artificial Sequence
  source: /note="Description of Artificial Sequence: Synthetic polynucleotide"
gaaatagtgatgacgcagtctccagccaccctgtctgtgtctccaggggaaagagccaccctctcctgcagggccagtcagagtgttagcagcaacttagcctggtaccagcagaaacctggccaggctcccaggctcctcatctatgaagcagccaccagggccactggtatcccagccagggtcagtggcagtgggtctgggacagagttcactctcaccatcagcagcctgcagtctgaagattttgcagtttattactgtcagcagtataataactggcctctcactttcggcggagggaccaaggtggagatcaaa

SEQ ID NO: 3254 - protein, 107 aa, Artificial Sequence
  source: /note="Description of Artificial Sequence: Synthetic polypeptide"
EIVMTQSPATLSVSPGERATLSCRASQSVSSNLAWYQQKPGQAPRLLIYEAATRATGIPARVSGSGSGTEFTLTISSLQSEDFAVYYCQQYNNWPLTFGGGTKVEIK

SEQ ID NO: 3255 - DNA, 321 bp, Artificial Sequence
  source: /note="Description of Artificial Sequence: Synthetic polynucleotide"
gaaatagtgatgacgcagtctccagccaccctgtctgtgtctccaggggaaagagccaccctctcctgcagggccagtcagagtgttgatgttaacttagcctggtaccagcagaaacctggccaggctcccaggctcctcatctacaacgcagccaccagggccactggtatcccagccaggttcagtggcagtgggtctgggacagagttcactctcaccatcagcagcctgcagtctgaagattttgcagtttattactgtcagcagtatcagaactggcctctcactttcggcggagggaccaaggtggagatcaaa

SEQ ID NO: 3256 - protein, 107 aa, Artificial Sequence
  source: /note="Description of Artificial Sequence: Synthetic polypeptide"
EIVMTQSPATLSVSPGERATLSCRASQSVDVNLAWYQQKPGQAPRLLIYNAATRATGIPARFSGSGSGTEFTLTISSLQSEDFAVYYCQQYQNWPLTFGGGTKVEIK

SEQ ID NO: 3257 - DNA, 321 bp, Artificial Sequence
  source: /note="Description of Artificial Sequence: Synthetic polynucleotide"
gaaatagtgatgacgcagtctccagccaccctgtctgtgtctccaggggaaagagccaccctctcctgcagggccagtcagagtgttgatgttaacttagcctggtaccagcagaaacctggccaggctcccaggctcctcatctacaacgcagccaccagggccactggtatcccagccagggtcagtggcagtgggtctgggacagagttcactctcaccatcagcagcctgcagtctgaagattttgcagtttattactgtcagcagtatcagaactggcctctcactttcggcggagggaccaaggtggagatcaaa

SEQ ID NO: 3258 - protein, 107 aa, Artificial Sequence
  source: /note="Description of Artificial Sequence: Synthetic polypeptide"
EIVMTQSPATLSVSPGERATLSCRASQSVDVNLAWYQQKPGQAPRLLIYNAATRATGIPARVSGSGSGTEFTLTISSLQSEDFAVYYCQQYQNWPLTFGGGTKVEIK

SEQ ID NO: 3259 - DNA, 321 bp, Artificial Sequence
  source: /note="Description of Artificial Sequence: Synthetic polynucleotide"
gaaatagtgatgacgcagtctccagccaccctgtctgtgtctccaggggaaagagccaccctctcctgcagggccagtcagagtgttcatacgaacttagcctggtaccagcagaaacctggccaggctcccaggctcctcatctacaacgcagccaccagggccactggtatcccagccaggttcagtggcagtgggtctgggacagagttcactctcaccatcagcagcctgcagtctgaagattttgcagtttattactgtcagcagtatcagaactggcctctcactttcggcggagggaccaaggtggagatcaaa

SEQ ID NO: 3260 - protein, 107 aa, Artificial Sequence
  source: /note="Description of Artificial Sequence: Synthetic polypeptide"
EIVMTQSPATLSVSPGERATLSCRASQSVHTNLAWYQQKPGQAPRLLIYNAATRATGIPARFSGSGSGTEFTLTISSLQSEDFAVYYCQQYQNWPLTFGGGTKVEIK

SEQ ID NO: 3261 - DNA, 321 bp, Artificial Sequence
  source: /note="Description of Artificial Sequence: Synthetic polynucleotide"
gaaatagtgatgacgcagtctccagccaccctgtctgtgtctccaggggaaagagccaccctctcctgcagggccagtcagagtgttaacctgaacttagcctggtaccagcagaaacctggccaggctcccaggctcctcatctaccaggcagccaccagggccactggtatcccagccaggttcagtggcagtgggtctgggacagagttcactctcaccatcagcagcctgcagtctgaagattttgcagtttattactgtcagcagtataaccagtggcctctcactttcggcggagggaccaaggtggagatcaaa

SEQ ID NO: 3262 - protein, 107 aa, Artificial Sequence
  source: /note="Description of Artificial Sequence: Synthetic polypeptide"
EIVMTQSPATLSVSPGERATLSCRASQSVNLNLAWYQQKPGQAPRLLIYQAATRATGIPARFSGSGSGTEFTLTISSLQSEDFAVYYCQQYNQWPLTFGGGTKVEIK

SEQ ID NO: 3263 - DNA, 321 bp, Artificial Sequence
  source: /note="Description of Artificial Sequence: Synthetic polynucleotide"
gaaatagtgatgacgcagtctccagccaccctgtctgtgtctccaggggaaagagccaccctctcctgcagggccagtcagagtgttttccagaacttagcctggtaccagcagaaacctggccaggctcccaggctcctcatctaccaggcagccaccagggccactggtatcccagccaggttcagtggcagtgggtctgggacagagttcactctcaccatcagcagcctgcagtctgaagattttgcagtttattactgtcagcagtataaccagtggcctctcactttcggcggagggaccaaggtggagatcaaa

SEQ ID NO: 3264 - protein, 107 aa, Artificial Sequence
  source: /note="Description of Artificial Sequence: Synthetic polypeptide"
EIVMTQSPATLSVSPGERATLSCRASQSVFQNLAWYQQKPGQAPRLLIYQAATRATGIPARFSGSGSGTEFTLTISSLQSEDFAVYYCQQYNQWPLTFGGGTKVEIK

SEQ ID NO: 3265 - DNA, 321 bp, Artificial Sequence; identical to SEQ ID NO: 3235
  source: /note="Description of Artificial Sequence: Synthetic polynucleotide"

SEQ ID NO: 3266 - protein, 107 aa, Artificial Sequence; identical to SEQ ID NO: 3236
  source: /note="Description of Artificial Sequence: Synthetic polypeptide"

SEQ ID NO: 3267 - DNA, 321 bp, Artificial Sequence
  source: /note="Description of Artificial Sequence: Synthetic polynucleotide"
gaaatagtgatgacgcagtctccagccaccctgtctgtgtctccaggggaaagagccaccctctcctgcagggccagtcagagtgttgatagacacttagcctggtaccagcagaaacctggccaggctcccaggctcctcatctacgaagcagccaccagggccactggtatcccagccagggtcagtggcagtgggtctgggacagagttcactctcaccatcagcagcctgcagtctgaagattttgcagtttattactgtcagcagtataaccagtggcctctcactttcggcggagggaccaaggtggagatcaaa

SEQ ID NO: 3268 - protein, 107 aa, Artificial Sequence
  source: /note="Description of Artificial Sequence: Synthetic polypeptide"
EIVMTQSPATLSVSPGERATLSCRASQSVDRHLAWYQQKPGQAPRLLIYEAATRATGIPARVSGSGSGTEFTLTISSLQSEDFAVYYCQQYNQWPLTFGGGTKVEIK

SEQ ID NO: 3269 - DNA, 321 bp, Artificial Sequence
  source: /note="Description of Artificial Sequence: Synthetic polynucleotide"
gaaatagtgatgacgcagtctccagccaccctgtctgtgtctccaggggaaagagccaccctctcctgcagggccagtcagagtgttaaccggcacttagcctggtaccagcagaaacctggccaggctcccaggctcctcatctacgaagcagccaccagggccactggtatcccagccaggttcagtggcagtgggtctgggacagagttcactctcaccatcagcagcctgcagtctgaagattttgcagtttattactgtcagcagtataaccagtggcctctcactttcggcggagggaccaaggtggagatcaaa

SEQ ID NO: 3270 - protein, 107 aa, Artificial Sequence
  source: /note="Description of Artificial Sequence: Synthetic polypeptide"
EIVMTQSPATLSVSPGERATLSCRASQSVNRHLAWYQQKPGQAPRLLIYEAATRATGIPARFSGSGSGTEFTLTISSLQSEDFAVYYCQQYNQWPLTFGGGTKVEIK

SEQ ID NO: 3271 - DNA, 321 bp, Artificial Sequence
  source: /note="Description of Artificial Sequence: Synthetic polynucleotide"
gaaatagtgatgacgcagtctccagccaccctgtctgtgtctccaggggaaagagccaccctctcctgcagggccagtcagagtgttgaaagacacttagcctggtaccagcagaaacctggccaggctcccaggctcctcatctacgaagcagccaccagggccactggtatcccagccaggttcagtggcagtgggtctgggacagagttcactctcaccatcagcagcctgcagtctgaagattttgcagtttattactgtcagcagtatcagcagtggcctctcactttcggcggagggaccaaggtggagatcaaa

SEQ ID NO: 3272 - protein, 107 aa, Artificial Sequence
  source: /note="Description of Artificial Sequence: Synthetic polypeptide"
EIVMTQSPATLSVSPGERATLSCRASQSVERHLAWYQQKPGQAPRLLIYEAATRATGIPARFSGSGSGTEFTLTISSLQSEDFAVYYCQQYQQWPLTFGGGTKVEIK

SEQ ID NO: 3273 - DNA, 321 bp, Artificial Sequence; identical to SEQ ID NO: 3171
  source: /note="Description of Artificial Sequence: Synthetic polynucleotide"

SEQ ID NO: 3274 - protein, 107 aa, Artificial Sequence; identical to SEQ ID NO: 3172
  source: /note="Description of Artificial Sequence: Synthetic polypeptide"

SEQ ID NO: 3275 - DNA, 321 bp, Artificial Sequence; identical to SEQ ID NO: 3179
  source: /note="Description of Artificial Sequence: Synthetic polynucleotide"

SEQ ID NO: 3276 - protein, 107 aa, Artificial Sequence; identical to SEQ ID NO: 3180
  source: /note="Description of Artificial Sequence: Synthetic polypeptide"

SEQ ID NO: 3277 - DNA, 321 bp, Artificial Sequence
  source: /note="Description of Artificial Sequence: Synthetic polynucleotide"
gaaatagtgatgacgcagtctccagccaccctgtctgtgtctccaggggaaagagccaccctctcctgcagggccagtcagagtgttaacagacacttagcctggtaccagcagaaacctggccaggctcccaggctcctcatctacgaagcagccaccagggccactggtatcccagccaggttcagtggcagtgggtctgggacagagttcactctcaccatcagcagcctgcagtctgaagattttgcagtttattactgtcagcagtataacaactggcctctcactttcggcggagggaccaaggtggagatcaaa

SEQ ID NO: 3278 - protein, 107 aa, Artificial Sequence
  source: /note="Description of Artificial Sequence: Synthetic polypeptide"
EIVMTQSPATLSVSPGERATLSCRASQSVNRHLAWYQQKPGQAPRLLIYEAATRATGIPARFSGSGSGTEFTLTISSLQSEDFAVYYCQQYNNWPLTFGGGTKVEIK

SEQ ID NO: 3279 - DNA, 321 bp, Artificial Sequence
  source: /note="Description of Artificial Sequence: Synthetic polynucleotide"
gaaatagtgatgacgcagtctccagccaccctgtctgtgtctccaggggaaagagccaccctctcctgcagggccagtcagagtgttaccagccacttagcctggtaccagcagaaacctggccaggctcccaggctcctcatctacgaagcagccaccagggccactggtatcccagccaggttcagtggcagtgggtctgggacagagttcactctcaccatcagcagcctgcagtctgaagattttgcagtttattactgtcagcagtataaccagtggcctctcactttcggcggagggaccaaggtggagatcaaa

SEQ ID NO: 3280 - protein, 107 aa, Artificial Sequence
  source: /note="Description of Artificial Sequence: Synthetic polypeptide"
EIVMTQSPATLSVSPGERATLSCRASQSVTSHLAWYQQKPGQAPRLLIYEAATRATGIPARFSGSGSGTEFTLTISSLQSEDFAVYYCQQYNQWPLTFGGGTKVEIK

SEQ ID NO: 3281 - DNA, 321 bp, Artificial Sequence
  source: /note="Description of Artificial Sequence: Synthetic polynucleotide"
gaaatagtgatgacgcagtctccagccaccctgtctgtgtctccaggggaaagagccaccctctcctgcagggccagtcagagtgttgatcagcacttagcctggtaccagcagaaacctggccaggctcccaggctcctcatctaccaggcagccaccagggccactggtatcccagccaggttcagtggcagtgggtctgggacagagttcactctcaccatcagcagcctgcagtctgaagattttgcagtttattactgtcagcagtatcagaactggcctctcactttcggcggagggaccaaggtggagatcaaa

SEQ ID NO: 3282 - protein, 107 aa, Artificial Sequence
  source: /note="Description of Artificial Sequence: Synthetic polypeptide"
EIVMTQSPATLSVSPGERATLSCRASQSVDQHLAWYQQKPGQAPRLLIYQAATRATGIPARFSGSGSGTEFTLTISSLQSEDFAVYYCQQYQNWPLTFGGGTKVEIK

SEQ ID NO: 3283 - DNA, 321 bp, Artificial Sequence
  source: /note="Description of Artificial Sequence: Synthetic polynucleotide"
atggacatgagggtgcccgctcagctcctggggctcctgctgctgtggctgagaggtgcgcgctgtgaaatcgtgatgacgcagtctccagccaccctgtctgtgtctccaggggaaagagccaccctctcctgcagggccagtcagagtgttagcgaacacttagcctggtaccagcagaaacctggccaggctcccaggctcctcatctacgaagcagccaccagggccactggtatcccagccaggttcagtggcagtgggtctgggacagagttcactctcaccatcagcagcctgcagtctgaagattttgcagtt

SEQ ID NO: 3284 - protein, 107 aa, Artificial Sequence; identical to SEQ ID NO: 3190
  source: /note="Description of Artificial Sequence: Synthetic polypeptide"

SEQ ID NO: 3285 - DNA, 321 bp, Artificial Sequence
  source: /note="Description of Artificial Sequence: Synthetic polynucleotide"
atggacatgagggtgcccgctcagctcctggggctcctgctgctgtggctgagaggtgcgcgctgtgaaatcgtgatgacgcagtctccagccaccctgtctgtgtctccaggggaaagagccaccctctcctgcagggccagtcagagtgttagcagcaacttagcctggtaccagcagaaacctggccaggctcccaggctcctcatctatggtgcagccaccagggccactggtatcccagccaggttcagtggcagtgggtctgggacagagttcactctcaccatcagcagcctgcagtctgaagattttgcagtt

SEQ ID NO: 3286 - protein, 107 aa, Artificial Sequence; identical to SEQ ID NO: 3246
  source: /note="Description of Artificial Sequence: Synthetic polypeptide"

SEQ ID NO: 3287 - DNA, 321 bp, Artificial Sequence
  source: /note="Description of Artificial Sequence: Synthetic polynucleotide"
atggacatgagggtgcccgctcagctcctggggctcctgctgctgtggctgagaggtgcgcgctgtgaaatcgtgctgacgcagtctccagccaccctgtctctgtctccaggggaaagagccaccctctcctgcagggccagtcagagtgttagcagcaacttagcctggtaccagcagaaacctggccaggctcccaggctcctcatctatggtgcagccaccagggccactggtatcccagacaggttcagtggcagtgggtctgggacagagttcactctcaccatcagcaggctggagcctgaagattttgcagtt

SEQ ID NO: 3288 - protein, 107 aa, Artificial Sequence
  source: /note="Description of Artificial Sequence: Synthetic polypeptide"
EIVLTQSPATLSLSPGERATLSCRASQSVSSNLAWYQQKPGQAPRLLIYGAATRATGIPDRFSGSGSGTEFTLTISRLEPEDFAVYYCQQYNNWPLTFGGGTKVEIK

SEQ ID NO: 3289 - DNA, 321 bp, Artificial Sequence
  source: /note="Description of Artificial Sequence: Synthetic polynucleotide"
atggacatgagggtgcccgctcagctcctggggctcctgctgctgtggctgagaggtgcgcgctgtgaaatcgtgctgacgcagtctccagccaccctgtctctgtctccaggggaaagagccaccctctcctgcagggccagtcagagtgttagcgaacacttagcctggtaccagcagaaacctggccaggctcccaggctcctcatctacgaagcagccaccagggccactggtatcccagacaggttcagtggcagtgggtctgggacagagttcactctcaccatcagcaggctggagcctgaagattttgcagtt

SEQ ID NO: 3290 - protein, 107 aa, Artificial Sequence
  source: /note="Description of Artificial Sequence: Synthetic polypeptide"
EIVLTQSPATLSLSPGERATLSCRASQSVSEHLAWYQQKPGQAPRLLIYEAATRATGIPDRFSGSGSGTEFTLTISRLEPEDFAVYYCQQYQNWPLTFGGGTKVEIK

SEQ ID NO: 3291 - DNA, 321 bp, Artificial Sequence; identical to SEQ ID NO: 3287
  source: /note="Description of Artificial Sequence: Synthetic polynucleotide"

SEQ ID NO: 3292 - protein, 107 aa, Artificial Sequence; identical to SEQ ID NO: 3288
  source: /note="Description of Artificial Sequence: Synthetic polypeptide"

SEQ ID NO: 3293 - DNA, 321 bp, Artificial Sequence
  source: /note="Description of Artificial Sequence: Synthetic polynucleotide"
atggacatgagggtgcccgctcagctcctggggctcctgctgctgtggctgagaggtgcgcgctgtgaaatcgtgctgacgcagtctccagccaccctgtctctgtctccaggggaaagagccaccctctcctgcagggccagtcagagtgttgatctgcacttagcctggtaccagcagaaacctggccaggctcccaggctcctcatctacgaagcagccaccagggccactggtatcccagacaggttcagtggcagtgggtctgggacagagttcactctcaccatcagcaggctggagcctgaagattttgcagtt

SEQ ID NO: 3294 - protein, 107 aa, Artificial Sequence
  source: /note="Description of Artificial Sequence: Synthetic polypeptide"
EIVLTQSPATLSLSPGERATLSCRASQSVDLHLAWYQQKPGQAPRLLIYEAATRATGIPDRFSGSGSGTEFTLTISRLEPEDFAVYYCQQYQNWPLTFGGGTKVEIK

SEQ ID NO: 3295 - DNA, 321 bp, Artificial Sequence
  source: /note="Description of Artificial Sequence: Synthetic polynucleotide"
atggacatgagggtgcccgctcagctcctggggctcctgctgctgtggctgagaggtgcgcgctgtgaaatcgtgctgacgcagtctccagccaccctgtctctgtctccaggggaaagagccaccctctcctgcagggccagtcagagtgttaacctgaacttagcctggtaccagcagaaacctggccaggctcccaggctcctcatctaccaggcagccaccagggccactggtatcccagacaggttcagtggcagtgggtctgggacagagttcactctcaccatcagcaggctggagcctgaagattttgcagtt

SEQ ID NO: 3296 - protein, 107 aa, Artificial Sequence
  source: /note="Description of Artificial Sequence: Synthetic polypeptide"
EIVLTQSPATLSLSPGERATLSCRASQSVNLNLAWYQQKPGQAPRLLIYQAATRATGIPDRFSGSGSGTEFTLTISRLEPEDFAVYYCQQYNQWPLTFGGGTKVEIK

SEQ ID NO: 3297 - DNA, 321 bp, Artificial Sequence
  source: /note="Description of Artificial Sequence: Synthetic polynucleotide"
atggacatgagggtgcccgctcagctcctggggctcctgctgctgtggctgagaggtgcgcgctgtgaaatcgtgctgacgcagtctccagccaccctgtctctgtctccaggggaaagagccaccctctcctgcagggccagtcagagtgttttcagccacttagcctggtaccagcagaaacctggccaggctcccaggctcctcatctacgaagcagccaccagggccactggtatcccagacaggttcagtggcagtgggtctgggacagagttcactctcaccatcagcaggctggagcctgaagattttgcagtt

SEQ ID NO: 3298 - protein, 107 aa, Artificial Sequence
  source: /note="Description of Artificial Sequence: Synthetic polypeptide"
EIVLTQSPATLSLSPGERATLSCRASQSVFSHLAWYQQKPGQAPRLLIYEAATRATGIPDRFSGSGSGTEFTLTISRLEPEDFAVYYCQQYQNWPLTFGGGTKVEIK

SEQ ID NO: 3299 - DNA, 360 bp, Artificial Sequence
  source: /note="Description of Artificial Sequence: Synthetic polynucleotide"
caggtgcagctggtggagtctgggggaggcgtggtccagcctgggaggtccctgagactctcctgtgcagcatctggattcaccttcagtaactatggcatgcactgggtccgccaggctccaggcgaggggctggagtgggtggcagctatatggtttgatgcaagtgataaatactatgcagacgccgtgaagggccgattcaccatctccagagacaactccaagaacacgctgtatctgcaaatgaacagcctgagagccgaggacacggctgtgtattactgtgcgagagatttggcgatttttggagtggtccccgactactggggccagggaaccctggtcaccgtgtctagt

SEQ ID NO: 3300 - protein, 120 aa, Artificial Sequence
  source: /note="Description of Artificial Sequence: Synthetic polypeptide"
QVQLVESGGGVVQPGRSLRLSCAASGFTFSNYGMHWVRQAPGEGLEWVAAIWFDASDKYYADAVKGRFTISRDNSKNTLYLQMNSLRAEDTAVYYCARDLAIFGVVPDYWGQGTLVTVSS

SEQ ID NO: 3301 - DNA, 360 bp, Artificial Sequence; identical to SEQ ID NO: 3299
  source: /note="Description of Artificial Sequence: Synthetic polynucleotide"

SEQ ID NO: 3302 - protein, 120 aa, Artificial Sequence; identical to SEQ ID NO: 3300
  source: /note="Description of Artificial Sequence: Synthetic polypeptide"

SEQ ID NO: 3303 - DNA, 360 bp, Artificial Sequence; identical to SEQ ID NO: 3299
  source: /note="Description of Artificial Sequence: Synthetic polynucleotide"

SEQ ID NO: 3304 - protein, 120 aa, Artificial Sequence; identical to SEQ ID NO: 3300
  source: /note="Description of Artificial Sequence: Synthetic polypeptide"

SEQ ID NO: 3305 - DNA, 360 bp, Artificial Sequence; identical to SEQ ID NO: 3299
  source: /note="Description of Artificial Sequence: Synthetic polynucleotide"

SEQ ID NO: 3306 - protein, 120 aa, Artificial Sequence; identical to SEQ ID NO: 3300
  source: /note="Description of Artificial Sequence: Synthetic polypeptide"

SEQ ID NO: 3307 - DNA, 360 bp, Artificial Sequence; identical to SEQ ID NO: 3299
  source: /note="Description of Artificial Sequence: Synthetic polynucleotide"

SEQ ID NO: 3308 - protein, 120 aa, Artificial Sequence; identical to SEQ ID NO: 3300
  source: /note="Description of Artificial Sequence: Synthetic polypeptide"

SEQ ID NO: 3309 - DNA, 360 bp, Artificial Sequence; identical to SEQ ID NO: 3299
  source: /note="Description of Artificial Sequence: Synthetic polynucleotide"

SEQ ID NO: 3310 - protein, 120 aa, Artificial Sequence; identical to SEQ ID NO: 3300
  source: /note="Description of Artificial Sequence: Synthetic polypeptide"

SEQ ID NO: 3311 - DNA, 360 bp, Artificial Sequence; identical to SEQ ID NO: 3299
  source: /note="Description of Artificial Sequence: Synthetic polynucleotide"

SEQ ID NO: 3312 - protein, 120 aa, Artificial Sequence; identical to SEQ ID NO: 3300
  source: /note="Description of Artificial Sequence: Synthetic polypeptide"

SEQ ID NO: 3313 - DNA, 360 bp, Artificial Sequence; identical to SEQ ID NO: 3299
  source: /note="Description of Artificial Sequence: Synthetic polynucleotide"

SEQ ID NO: 3314 - protein, 120 aa, Artificial Sequence; identical to SEQ ID NO: 3300
  source: /note="Description of Artificial Sequence: Synthetic polypeptide"

SEQ ID NO: 3315 - DNA, 360 bp, Artificial Sequence; identical to SEQ ID NO: 3299
  source: /note="Description of Artificial Sequence: Synthetic polynucleotide"

SEQ ID NO: 3316 - protein, 120 aa, Artificial Sequence; identical to SEQ ID NO: 3300
  source: /note="Description of Artificial Sequence: Synthetic polypeptide"

SEQ ID NO: 3317 - DNA, 360 bp, Artificial Sequence; identical to SEQ ID NO: 3299
  source: /note="Description of Artificial Sequence: Synthetic polynucleotide"

SEQ ID NO: 3318 - protein, 120 aa, Artificial Sequence; identical to SEQ ID NO: 3300
  source: /note="Description of Artificial Sequence: Synthetic polypeptide"

SEQ ID NO: 3319 - DNA, 360 bp, Artificial Sequence; identical to SEQ ID NO: 3299
  source: /note="Description of Artificial Sequence: Synthetic polynucleotide"

SEQ ID NO: 3320 - protein, 120 aa, Artificial Sequence; identical to SEQ ID NO: 3300
  source: /note="Description of Artificial Sequence: Synthetic polypeptide"

SEQ ID NO: 3321 - DNA, 360 bp, Artificial Sequence; identical to SEQ ID NO: 3299
  source: /note="Description of Artificial Sequence: Synthetic polynucleotide"

SEQ ID NO: 3322 - protein, 120 aa, Artificial Sequence; identical to SEQ ID NO: 3300
  source: /note="Description of Artificial Sequence: Synthetic polypeptide"

SEQ ID NO: 3323 - DNA, 360 bp, Artificial Sequence; identical to SEQ ID NO: 3299
  source: /note="Description of Artificial Sequence: Synthetic polynucleotide"

SEQ ID NO: 3324 - protein, 120 aa, Artificial Sequence; identical to SEQ ID NO: 3300
  source: /note="Description of Artificial Sequence: Synthetic polypeptide"

SEQ ID NO: 3325 - DNA, 360 bp, Artificial Sequence
  source: /note="Description of Artificial Sequence: Synthetic polynucleotide"
caggtgcagctggtggagtctgggggaggcgtggtccagcctgggaggtccctgagactctcctgtgcagcatctggattcaccttcagtaactatggcatgcactgggtccgccaggctccaggcgaggggctggagtgggtggcagctatatggtttgatgcaagtgataaatactatgcagacgccgtgaagggccgattcaccatctccagagacaactccaagaacacgctgtatctgcaaatgaacagcctgagagccgaggacacggctgtgtattactgtgcgagagatctggcgatttttggagtgattcccgactactggggccagggaaccctggtcaccgtgtctagt

SEQ ID NO: 3326 - protein, 120 aa, Artificial Sequence
  source: /note="Description of Artificial Sequence: Synthetic polypeptide"
QVQLVESGGGVVQPGRSLRLSCAASGFTFSNYGMHWVRQAPGEGLEWVAAIWFDASDKYYADAVKGRFTISRDNSKNTLYLQMNSLRAEDTAVYYCARDLAIFGVIPDYWGQGTLVTVSS

SEQ ID NO: 3327 - DNA, 360 bp, Artificial Sequence; identical to SEQ ID NO: 3299
  source: /note="Description of Artificial Sequence: Synthetic polynucleotide"

SEQ ID NO: 3328 - protein, 120 aa, Artificial Sequence; identical to SEQ ID NO: 3300
  source: /note="Description of Artificial Sequence: Synthetic polypeptide"

SEQ ID NO: 3329 - DNA, 360 bp, Artificial Sequence; identical to SEQ ID NO: 3299
  source: /note="Description of Artificial Sequence: Synthetic polynucleotide"

SEQ ID NO: 3330 - protein, 120 aa, Artificial Sequence; identical to SEQ ID NO: 3300
  source: /note="Description of Artificial Sequence: Synthetic polypeptide"

SEQ ID NO: 3331 - DNA, 360 bp, Artificial Sequence
  source: /note="Description of Artificial Sequence: Synthetic polynucleotide"
caggtgcagctggtggagtctgggggaggcgtggtccagcctgggaggtccctgagactctcctgtgcagcatctggattcaccttccagaactatggcatgcactgggtccgccaggctccaggcgaggggctggagtgggtggcagctatatggtttgatgcgtctgacaaatactatgcagacgccgtgaagggccgattcaccatctccagagacaactccaagaacacgctgtatctgcaaatgaacagcctgagagccgaggacacggctgtgtattactgtgcgagagatcttgcgatttttggagtggtccccgactactggggccagggaaccctggtcaccgtgtctagt

SEQ ID NO: 3332 - protein, 120 aa, Artificial Sequence
  source: /note="Description of Artificial Sequence: Synthetic polypeptide"
QVQLVESGGGVVQPGRSLRLSCAASGFTFQNYGMHWVRQAPGEGLEWVAAIWFDASDKYYADAVKGRFTISRDNSKNTLYLQMNSLRAEDTAVYYCARDLAIFGVVPDYWGQGTLVTVSS

SEQ ID NO: 3333 - DNA, 360 bp, Artificial Sequence; identical to SEQ ID NO: 3331
  source: /note="Description of Artificial Sequence: Synthetic polynucleotide"

SEQ ID NO: 3334 - protein, 120 aa, Artificial Sequence; identical to SEQ ID NO: 3332
  source: /note="Description of Artificial Sequence: Synthetic polypeptide"

SEQ ID NO: 3335 - DNA, 360 bp, Artificial Sequence; identical to SEQ ID NO: 3331
  source: /note="Description of Artificial Sequence: Synthetic polynucleotide"

SEQ ID NO: 3336 - protein, 120 aa, Artificial Sequence; identical to SEQ ID NO: 3332
  source: /note="Description of Artificial Sequence: Synthetic polypeptide"

SEQ ID NO: 3337 - DNA, 360 bp, Artificial Sequence; identical to SEQ ID NO: 3299
  source: /note="Description of Artificial Sequence: Synthetic polynucleotide"

SEQ ID NO: 3338 - protein, 120 aa, Artificial Sequence; identical to SEQ ID NO: 3300
  source: /note="Description of Artificial Sequence: Synthetic polypeptide"

SEQ ID NO: 3339 - DNA, 360 bp, Artificial Sequence; identical to SEQ ID NO: 3299
  source: /note="Description of Artificial Sequence: Synthetic polynucleotide"

SEQ ID NO: 3340 - protein, 120 aa, Artificial Sequence; identical to SEQ ID NO: 3300
  source: /note="Description of Artificial Sequence: Synthetic polypeptide"

SEQ ID NO: 3341 - DNA, 360 bp, Artificial Sequence
  source: /note="Description of Artificial Sequence: Synthetic polynucleotide"
caggtgcagctggtggagtctgggggaggcgtggtccagcctgggaggtccctgagactctcctgtgcagcatctggattcaccttcagtaactatggcatgcactgggtccgccaggctccaggcgaggggctggagtgggtggcagctatatggtttgatgcaagtgataaatactatgcagacgccgtgaagggccgattcaccatctccagagacaactccaagaacacgctgtatctgcaaatgaacagcctgagagccgaggacacggctgtgtattactgtgcgagagatattgcgatttttggagtggtccccgactactggggccagggaaccctggtcaccgtgtctagt

SEQ ID NO: 3342 - protein, 120 aa, Artificial Sequence
  source: /note="Description of Artificial Sequence: Synthetic polypeptide"
QVQLVESGGGVVQPGRSLRLSCAASGFTFSNYGMHWVRQAPGEGLEWVAAIWFDASDKYYADAVKGRFTISRDNSKNTLYLQMNSLRAEDTAVYYCARDIAIFGVVPDYWGQGTLVTVSS

SEQ ID NO: 3343 - DNA, 360 bp, Artificial Sequence; identical to SEQ ID NO: 3341
  source: /note="Description of Artificial Sequence: Synthetic polynucleotide"

SEQ ID NO: 3344 - protein, 120 aa, Artificial Sequence; identical to SEQ ID NO: 3342
  source: /note="Description of Artificial Sequence: Synthetic polypeptide"

SEQ ID NO: 3345 - DNA, 360 bp, Artificial Sequence; identical to SEQ ID NO: 3299
  source: /note="Description of Artificial Sequence: Synthetic polynucleotide"

SEQ ID NO: 3346 - protein, 120 aa, Artificial Sequence; identical to SEQ ID NO: 3300
  source: /note="Description of Artificial Sequence: Synthetic polypeptide"

SEQ ID NO: 3347 - DNA, 360 bp, Artificial Sequence; identical to SEQ ID NO: 3299
  source: /note="Description of Artificial Sequence: Synthetic polynucleotide"

SEQ ID NO: 3348 - protein, 120 aa, Artificial Sequence; identical to SEQ ID NO: 3300
  source: /note="Description of Artificial Sequence: Synthetic polypeptide"

SEQ ID NO: 3349 - DNA, 360 bp, Artificial Sequence; identical to SEQ ID NO: 3299
  source: /note="Description of Artificial Sequence: Synthetic polynucleotide"

SEQ ID NO: 3350 - protein, 120 aa, Artificial Sequence; identical to SEQ ID NO: 3300
  source: /note="Description of Artificial Sequence: Synthetic polypeptide"

SEQ ID NO: 3351 - DNA, 360 bp, Artificial Sequence; identical to SEQ ID NO: 3299
  source: /note="Description of Artificial Sequence: Synthetic polynucleotide"

SEQ ID NO: 3352 - protein, 120 aa, Artificial Sequence; identical to SEQ ID NO: 3300
  source: /note="Description of Artificial Sequence: Synthetic polypeptide"

SEQ ID NO: 3353 - DNA, 360 bp, Artificial Sequence; identical to SEQ ID NO: 3299
  source: /note="Description of Artificial Sequence: Synthetic polynucleotide"

SEQ ID NO: 3354 - protein, 120 aa, Artificial Sequence; identical to SEQ ID NO: 3300
  source: /note="Description of Artificial Sequence: Synthetic polypeptide"

SEQ ID NO: 3355 - DNA, 360 bp, Artificial Sequence; identical to SEQ ID NO: 3299
  source: /note="Description of Artificial Sequence: Synthetic polynucleotide"

SEQ ID NO: 3356 - protein, 120 aa, Artificial Sequence; identical to SEQ ID NO: 3300
  source: /note="Description of Artificial Sequence: Synthetic polypeptide"

SEQ ID NO: 3357 - DNA, 360 bp, Artificial Sequence; identical to SEQ ID NO: 3299
  source: /note="Description of Artificial Sequence: Synthetic polynucleotide"

SEQ ID NO: 3358 - protein, 120 aa, Artificial Sequence; identical to SEQ ID NO: 3300
  source: /note="Description of Artificial Sequence: Synthetic polypeptide"

SEQ ID NO: 3359 - DNA, 360 bp, Artificial Sequence; identical to SEQ ID NO: 3299
  source: /note="Description of Artificial Sequence: Synthetic polynucleotide"

SEQ ID NO: 3360 - protein, 120 aa, Artificial Sequence; identical to SEQ ID NO: 3300
  source: /note="Description of Artificial Sequence: Synthetic polypeptide"

SEQ ID NO: 3361 - DNA, 360 bp, Artificial Sequence; identical to SEQ ID NO: 3299
  source: /note="Description of Artificial Sequence: Synthetic polynucleotide"

SEQ ID NO: 3362 - protein, 120 aa, Artificial Sequence; identical to SEQ ID NO: 3300
  source: /note="Description of Artificial Sequence: Synthetic polypeptide"

SEQ ID NO: 3363 - DNA, 360 bp, Artificial Sequence
  source: /note="Description of Artificial Sequence: Synthetic polynucleotide"
caggtgcagctggtggagtctgggggaggcgtggtccagcctgggaggtccctgagactctcctgtgcagcatctggattcaccttcagtaactatggcatgcactgggtccgccaggctccaggcgaggggctggagtgggtggcagctatatggtttgatgcaagtgataaatactatgcagacgccgtgaagggccgattcaccatctccagagacaactccaagaacacgctgtatctgcaaatgaacagcctgagagccgaggacacggctgtgtattactgtgcgagagatattgcgatttttggagtgtttcccgactactggggccagggaaccctggtcaccgtgtctagt

SEQ ID NO: 3364 - protein, 120 aa, Artificial Sequence
  source: /note="Description of Artificial Sequence: Synthetic polypeptide"
QVQLVESGGGVVQPGRSLRLSCAASGFTFSNYGMHWVRQAPGEGLEWVAAIWFDASDKYYADAVKGRFTISRDNSKNTLYLQMNSLRAEDTAVYYCARDIAIFGVFPDYWGQGTLVTVSS

SEQ ID NO: 3365 - DNA, 360 bp, Artificial Sequence; identical to SEQ ID NO: 3363
  source: /note="Description of Artificial Sequence: Synthetic polynucleotide"

SEQ ID NO: 3366 - protein, 120 aa, Artificial Sequence; identical to SEQ ID NO: 3364
  source: /note="Description of Artificial Sequence: Synthetic polypeptide"

SEQ ID NO: 3367 - DNA, 360 bp, Artificial Sequence; identical to SEQ ID NO: 3341
  source: /note="Description of Artificial Sequence: Synthetic polynucleotide"

SEQ ID NO: 3368 - protein, 120 aa, Artificial Sequence; identical to SEQ ID NO: 3342
  source: /note="Description of Artificial Sequence: Synthetic polypeptide"

SEQ ID NO: 3369 - DNA, 360 bp, Artificial Sequence; identical to SEQ ID NO: 3341
  source: /note="Description of Artificial Sequence: Synthetic polynucleotide"

SEQ ID NO: 3370 - protein, 120 aa, Artificial Sequence; identical to SEQ ID NO: 3342
  source: /note="Description of Artificial Sequence: Synthetic polypeptide"

SEQ ID NO: 3371 - DNA, 360 bp, Artificial Sequence; identical to SEQ ID NO: 3363
  source: /note="Description of Artificial Sequence: Synthetic polynucleotide"

SEQ ID NO: 3372 - protein, 120 aa, Artificial Sequence; identical to SEQ ID NO: 3364
  source: /note="Description of Artificial Sequence: Synthetic polypeptide"

SEQ ID NO: 3373 - DNA, 360 bp, Artificial Sequence; identical to SEQ ID NO: 3363
  source: /note="Description of Artificial Sequence: Synthetic polynucleotide"

SEQ ID NO: 3374 - protein, 120 aa, Artificial Sequence; identical to SEQ ID NO: 3364
  source: /note="Description of Artificial Sequence: Synthetic polypeptide"

SEQ ID NO: 3375 - DNA, 360 bp, Artificial Sequence; identical to SEQ ID NO: 3363
  source: /note="Description of Artificial Sequence: Synthetic polynucleotide"

SEQ ID NO: 3376 - protein, 120 aa, Artificial Sequence; identical to SEQ ID NO: 3364
  source: /note="Description of Artificial Sequence: Synthetic polypeptide"

SEQ ID NO: 3377 - DNA, 360 bp, Artificial Sequence
  source: /note="Description of Artificial Sequence: Synthetic polynucleotide"
caggtgcagctggtggagtctgggggaggcgtggtccagcctgggaggtccctgagactctcctgtgcagcatctggattcaccttcagtaactatggcatgcactgggtccgccaggctccaggcgaggggctggagtgggtggcagctatatggtttgatgcaagtgataaatactatgcagacgccgtgaagggccgattcaccatctccagagacaactccaagaacacgctgtatctgcaaatgaacagcctgagagccgaggacacggctgtgtattactgtgcgagagatattgcgatttttggagtgatccccgactactggggccagggaaccctggtcaccgtgtctagt

SEQ ID NO: 3378 - protein, 120 aa, Artificial Sequence
  source: /note="Description of Artificial Sequence: Synthetic polypeptide"
QVQLVESGGGVVQPGRSLRLSCAASGFTFSNYGMHWVRQAPGEGLEWVAAIWFDASDKYYADAVKGRFTISRDNSKNTLYLQMNSLRAEDTAVYYCARDIAIFGVIPDYWGQGTLVTVSS

SEQ ID NO: 3379 - DNA, 360 bp, Artificial Sequence; identical to SEQ ID NO: 3377
  source: /note="Description of Artificial Sequence: Synthetic polynucleotide"

SEQ ID NO: 3380 - protein, 120 aa, Artificial Sequence; identical to SEQ ID NO: 3378
  source: /note="Description of Artificial Sequence: Synthetic polypeptide"

SEQ ID NO: 3381 - DNA, 360 bp, Artificial Sequence; identical to SEQ ID NO: 3299
  source: /note="Description of Artificial Sequence: Synthetic polynucleotide"

SEQ ID NO: 3382 - protein, 120 aa, Artificial Sequence; identical to SEQ ID NO: 3300
  source: /note="Description of Artificial Sequence: Synthetic polypeptide"

SEQ ID NO: 3383 - DNA, 360 bp, Artificial Sequence
  source: /note="Description of Artificial Sequence: Synthetic polynucleotide"
caggtgcagctggtggagtctgggggaggcgtggtccagcctgggaggtccctgagactctcctgtgcagcatctggattcaccttcagtaactatggcatgcactgggtccgccaggctccaggcgaggggctggagtgggtggcagctatatggtttgatgcaagtgataaatactatgcagacgccgtgaagggccgattcaccatctccagagacaactccaagaacacgctgtatctgcaaatgaacagcctgagagccgaggacacggctgtgtattactgtgcgagagatcaggcgatttttggagtggtccccgattactggggccagggaaccctggtcaccgtgtctagt

SEQ ID NO: 3384 - protein, 120 aa, Artificial Sequence; identical to SEQ ID NO: 228
  source: /note="Description of Artificial Sequence: Synthetic polypeptide"

SEQ ID NO: 3385 - DNA, 360 bp, Artificial Sequence; identical to SEQ ID NO: 3341
  source: /note="Description of Artificial Sequence: Synthetic polynucleotide"

SEQ ID NO: 3386 - protein, 120 aa, Artificial Sequence; identical to SEQ ID NO: 3342
  source: /note="Description of Artificial Sequence: Synthetic polypeptide"

SEQ ID NO: 3387 - DNA, 360 bp, Artificial Sequence; identical to SEQ ID NO: 3299
  source: /note="Description of Artificial Sequence: Synthetic polynucleotide"

SEQ ID NO: 3388 - protein, 120 aa, Artificial Sequence; identical to SEQ ID NO: 3300
  source: /note="Description of Artificial Sequence: Synthetic polypeptide"

SEQ ID NO: 3389 - DNA, 360 bp, Artificial Sequence; identical to SEQ ID NO: 3383
  source: /note="Description of Artificial Sequence: Synthetic polynucleotide"

SEQ ID NO: 3390 - protein, 120 aa, Artificial Sequence; identical to SEQ ID NO: 228
  source: /note="Description of Artificial Sequence: Synthetic polypeptide"

SEQ ID NO: 3391 - DNA, 360 bp, Artificial Sequence; identical to SEQ ID NO: 3299
  source: /note="Description of Artificial Sequence: Synthetic polynucleotide"

SEQ ID NO: 3392 - protein, 120 aa, Artificial Sequence; identical to SEQ ID NO: 3300
  source: /note="Description of Artificial Sequence: Synthetic polypeptide"

SEQ ID NO: 3393 - DNA, 360 bp, Artificial Sequence; identical to SEQ ID NO: 3299
  source: /note="Description of Artificial Sequence: Synthetic polynucleotide"

SEQ ID NO: 3394 - protein, 120 aa, Artificial Sequence; identical to SEQ ID NO: 3300
  source: /note="Description of Artificial Sequence: Synthetic polypeptide"

SEQ ID NO: 3395 - DNA, 360 bp, Artificial Sequence; identical to SEQ ID NO: 3341
  source: /note="Description of Artificial Sequence: Synthetic polynucleotide"

SEQ ID NO: 3396 - protein, 120 aa, Artificial Sequence; identical to SEQ ID NO: 3342
  source: /note="Description of Artificial Sequence: Synthetic polypeptide"

SEQ ID NO: 3397 - DNA, 360 bp, Artificial Sequence; identical to SEQ ID NO: 3299
  source: /note="Description of Artificial Sequence: Synthetic polynucleotide"

SEQ ID NO: 3398 - protein, 120 aa, Artificial Sequence; identical to SEQ ID NO: 3300
  source: /note="Description of Artificial Sequence: Synthetic polypeptide"

SEQ ID NO: 3399 - DNA, 360 bp, Artificial Sequence; identical to SEQ ID NO: 3341
  source: /note="Description of Artificial Sequence: Synthetic polynucleotide"

SEQ ID NO: 3400 - protein, 120 aa, Artificial Sequence; identical to SEQ ID NO: 3342
  source: /note="Description of Artificial Sequence: Synthetic polypeptide"

SEQ ID NO: 3401 - DNA, 360 bp, Artificial Sequence
  source: /note="Description of Artificial Sequence: Synthetic polynucleotide"
caggtgcagctggtggagtctgggggaggcgtggtccagcctgggaggtccctgagactctcctgtgcagcatctggattcaccttccagaactatggcatgcactgggtccgccaggctccaggcgaggggctggagtgggtggcagctatatggtttgatgcgtacggtaaatactatgcagacgccgtgaagggccgattcaccatctccagagacaactccaagaacacgctgtatctgcaaatgaacagcctgagagccgaggacacggctgtgtattactgtgcgagagatcagacgatttttggagtggtccccgactactggggccagggaaccctggtcaccgtgtctagt

SEQ ID NO: 3402 - protein, 120 aa, Artificial Sequence
  source: /note="Description of Artificial Sequence: Synthetic polypeptide"
QVQLVESGGGVVQPGRSLRLSCAASGFTFQNYGMHWVRQAPGEGLEWVAAIWFDAYGKYYADAVKGRFTISRDNSKNTLYLQMNSLRAEDTAVYYCARDQTIFGVVPDYWGQGTLVTVSS

SEQ ID NO: 3403 - DNA, 360 bp, Artificial Sequence; identical to SEQ ID NO: 3401
  source: /note="Description of Artificial Sequence: Synthetic polynucleotide"

SEQ ID NO: 3404 - protein, 120 aa, Artificial Sequence; identical to SEQ ID NO: 3402
  source: /note="Description of Artificial Sequence: Synthetic polypeptide"

SEQ ID NO: 3405 - DNA, 360 bp, Artificial Sequence
  source: /note="Description of Artificial Sequence: Synthetic polynucleotide"
caggtgcagctggtggagtctgggggaggcgtggtccagcctgggaggtccctgagactctcctgtgcagcatctggattcaccttccagaactatggcatgcactgggtccgccaggctccaggcgaggggctggagtgggtggcagctatatggtttgatgcgtacggtaaatactatgcagacgccgtgaagggccgattcaccatctccagagacaactccaagaacacgctgtatctgcaaatgaacagcctgagagccgaggacacggctgtgtattactgtgcgagagataagacgatttttggagtggtccccgactactggggccagggaaccctggtcaccgtgtctagt

SEQ ID NO: 3406 - protein, 120 aa, Artificial Sequence
  source: /note="Description of Artificial Sequence: Synthetic polypeptide"
QVQLVESGGGVVQPGRSLRLSCAASGFTFQNYGMHWVRQAPGEGLEWVAAIWFDAYGKYYADAVKGRFTISRDNSKNTLYLQMNSLRAEDTAVYYCARDKTIFGVVPDYWGQGTLVTVSS

SEQ ID NO: 3407 - DNA, 360 bp, Artificial Sequence; identical to SEQ ID NO: 3405
  source: /note="Description of Artificial Sequence: Synthetic polynucleotide"

SEQ ID NO: 3408 - protein, 120 aa, Artificial Sequence; identical to SEQ ID NO: 3406
  source: /note="Description of Artificial Sequence: Synthetic polypeptide"

SEQ ID NO: 3409 - DNA, 360 bp, Artificial Sequence
  source: /note="Description of Artificial Sequence: Synthetic polynucleotide"
caggtgcagctggtggagtctgggggaggcgtggtccagcctgggaggtccctgagactctcctgtgcagcatctggattcaccttcagtaactatggcatgcactgggtccgccaggctccaggcgaggggctggagtgggtggcagctatatggtttgatgcgtacggtaaatactatgcagacgccgtgaagggccgattcaccatctccagagacaactccaagaacacgctgtatctgcaaatgaacagcctgagagccgaggacacggctgtgtattactgtgcgagagataagacgatttttggagtggtccccgactactggggccagggaaccctggtcaccgtgtctagt

SEQ ID NO: 3410 - protein, 120 aa, Artificial Sequence
  source: /note="Description of Artificial Sequence: Synthetic polypeptide"
QVQLVESGGGVVQPGRSLRLSCAASGFTFSNYGMHWVRQAPGEGLEWVAAIWFDAYGKYYADAVKGRFTISRDNSKNTLYLQMNSLRAEDTAVYYCARDKTIFGVVPDYWGQGTLVTVSS

SEQ ID NO: 3411 - DNA, 360 bp, Artificial Sequence
  source: /note="Description of Artificial Sequence: Synthetic polynucleotide"
caggtgcagctggtggagtctgggggaggcgtggtccagcctgggaggtccctgagactctcctgtgcagcatctggattcaccttccagaactatggcatgcactgggtccgccaggctccaggcgaggggctggagtgggtggcagctatatggtttgatgcgtacgacaaatactatgcagacgccgtgaagggccgattcaccatctccagagacaactccaagaacacgctgtatctgcaaatgaacagcctgagagccgaggacacggctgtgtattactgtgcgagagataagtcgatttttggagtggtccccgactactggggccagggaaccctggtcaccgtgtctagt

SEQ ID NO: 3412 - protein, 120 aa, Artificial Sequence
  source: /note="Description of Artificial Sequence: Synthetic polypeptide"
QVQLVESGGGVVQPGRSLRLSCAASGFTFQNYGMHWVRQAPGEGLEWVAAIWFDAYDKYYADAVKGRFTISRDNSKNTLYLQMNSLRAEDTAVYYCARDKSIFGVVPDYWGQGTLVTVSS

SEQ ID NO: 3413 - DNA, 360 bp, Artificial Sequence; identical to SEQ ID NO: 3411
  source: /note="Description of Artificial Sequence: Synthetic polynucleotide"

SEQ ID NO: 3414 - protein, 120 aa, Artificial Sequence; identical to SEQ ID NO: 3412
  source: /note="Description of Artificial Sequence: Synthetic polypeptide"

SEQ ID NO: 3415 - DNA, 360 bp, Artificial Sequence
  source: /note="Description of Artificial Sequence: Synthetic polynucleotide"
caggtgcagctggtggagtctgggggaggcgtggtccagcctgggaggtccctgagactctcctgtgcagcatctggattcaccttccagaactatggcatgcactgggtccgccaggctccaggcgaggggctggagtgggtggcagctatatggtttgatgcgtacgacaaatactatgcagacgccgtgaagggccgattcaccatctccagagacaactccaagaacacgctgtatctgcaaatgaacagcctgagagccgaggacacggctgtgtattactgtgcgagagatctcgcgatttttggagtggtccccgactactggggccagggaaccctggtcaccgtgtctagt

SEQ ID NO: 3416 - protein, 120 aa, Artificial Sequence
  source: /note="Description of Artificial Sequence: Synthetic polypeptide"
QVQLVESGGGVVQPGRSLRLSCAASGFTFQNYGMHWVRQAPGEGLEWVAAIWFDAYDKYYADAVKGRFTISRDNSKNTLYLQMNSLRAEDTAVYYCARDLAIFGVVPDYWGQGTLVTVSS

SEQ ID NO: 3417 - DNA, 360 bp, Artificial Sequence
  source: /note="Description of Artificial Sequence: Synthetic polynucleotide"
caggtgcagctggtggagtctgggggaggcgtggtccagcctgggaggtccctgagactctcctgtgcagcatctggattcaccttccagaactatggcatgcactgggtccgccaggctccaggcgaggggctggagtgggtggcagctatatggtttgatgcggctttcaaatactatgcagacgccgtgaagggccgattcaccatctccagagacaactccaagaacacgctgtatctgcaaatgaacagcctgagagccgaggacacggctgtgtattactgtgcgagagatctcgcgatttttggagtggtccccgactactggggccagggaaccctggtcaccgtgtctagt

SEQ ID NO: 3418 - protein, 120 aa, Artificial Sequence
  source: /note="Description of Artificial Sequence: Synthetic polypeptide"
QVQLVESGGGVVQPGRSLRLSCAASGFTFQNYGMHWVRQAPGEGLEWVAAIWFDAAFKYYADAVKGRFTISRDNSKNTLYLQMNSLRAEDTAVYYCARDLAIFGVVPDYWGQGTLVTVSS

SEQ ID NO: 3419 - DNA, 360 bp, Artificial Sequence
  source: /note="Description of Artificial Sequence: Synthetic polynucleotide"
atggacatgagggtgcccgctcagctcctggggctcctgctgctgtggctgagaggtgcgcgctgtcaggtgcagctggtggagtctgggggaggcgtggtccagcctgggaggtccctgagactctcctgtgcagcatctggattcaccttcagtaactatggcatgcactgggtccgccaggctccaggcgaggggctggagtgggtggcagctatctggtttgatgcaagtgataaatactatgcagacgccgtgaagggccgattcaccatctccagagacaactccaagaacacgctgtatctgcaaatgaacagcctgagagccgaggacacggctgtgtattactgtgcgaga

SEQ ID NO: 3420 - protein, 120 aa, Artificial Sequence; identical to SEQ ID NO: 3326
  source: /note="Description of Artificial Sequence: Synthetic polypeptide"

SEQ ID NO: 3421 - DNA, 360 bp, Artificial Sequence; identical to SEQ ID NO: 3419
  source: /note="Description of Artificial Sequence: Synthetic polynucleotide"

SEQ ID NO: 3422 - protein, 120 aa, Artificial Sequence; identical to SEQ ID NO: 3342
  source: /note="Description of Artificial Sequence: Synthetic polypeptide"

SEQ ID NO: 3423 - DNA, 360 bp, Artificial Sequence; identical to SEQ ID NO: 3419
  source: /note="Description of Artificial Sequence: Synthetic polynucleotide"

SEQ ID NO: 3424 - protein, 120 aa, Artificial Sequence; identical to SEQ ID NO: 228
  source: /note="Description of Artificial Sequence: Synthetic polypeptide"

SEQ ID NO: 3425 - DNA, 360 bp, Artificial Sequence; identical to SEQ ID NO: 3419
  source: /note="Description of Artificial Sequence: Synthetic polynucleotide"

SEQ ID NO: 3426 - protein, 120 aa, Artificial Sequence; identical to SEQ ID NO: 3326
  source: /note="Description of Artificial Sequence: Synthetic polypeptide"

SEQ ID NO: 3427 - DNA, 360 bp, Artificial Sequence; identical to SEQ ID NO: 3419
  source: /note="Description of Artificial Sequence: Synthetic polynucleotide"

SEQ ID NO: 3428 - protein, 120 aa, Artificial Sequence; identical to SEQ ID NO: 3342
  source: /note="Description of Artificial Sequence: Synthetic polypeptide"

SEQ ID NO: 3429 - DNA, 360 bp, Artificial Sequence; identical to SEQ ID NO: 3419
  source: /note="Description of Artificial Sequence: Synthetic polynucleotide"

SEQ ID NO: 3430 - protein, 120 aa, Artificial Sequence; identical to SEQ ID NO: 3300
  source: /note="Description of Artificial Sequence: Synthetic polypeptide"

SEQ ID NO: 3431 - DNA, 360 bp, Artificial Sequence; identical to SEQ ID NO: 3419
  source: /note="Description of Artificial Sequence: Synthetic polynucleotide"

SEQ ID NO: 3432 - protein, 120 aa, Artificial Sequence; identical to SEQ ID NO: 3300
  source: /note="Description of Artificial Sequence: Synthetic polypeptide"

SEQ ID NO: 3433 - DNA, 360 bp, Artificial Sequence
  source: /note="Description of Artificial Sequence: Synthetic polynucleotide"
atggacatgagggtgcccgctcagctcctggggctcctgctgctgtggctgagaggtgcgcgctgtcaggtgcagctggtggagtctgggggaggcgtggtccagcctgggaggtccctgagactctcctgtgcagcatctggattcaccttccagaactatggcatgcactgggtccgccaggctccaggcgaggggctggagtgggtggcagctatctggtttgatgcgtctgacaaatactatgcagacgccgtgaagggccgattcaccatctccagagacaactccaagaacacgctgtatctgcaaatgaacagcctgagagccgaggacacggctgtgtattactgtgcgaga

SEQ ID NO: 3434 - protein, 120 aa, Artificial Sequence; identical to SEQ ID NO: 3332
  source: /note="Description of Artificial Sequence: Synthetic polypeptide"

SEQ ID NO: 3435 - DNA, 33 bp, Artificial Sequence
  source: /note="Description of Artificial Sequence: Synthetic oligonucleotide"
agggccagtcagagtgttgatagacacttagcc

SEQ ID NO: 3436 - protein, 11 aa, Artificial Sequence
  source: /note="Description of Artificial Sequence: Synthetic peptide"
RASQSVDRHLA

SEQ ID NO: 3437 - DNA, 33 bp, Artificial Sequence
  source: /note="Description of Artificial Sequence: Synthetic oligonucleotide"
agggccagtcagagtgttaacagacacttagcc

SEQ ID NO: 3438 - protein, 11 aa, Artificial Sequence
  source: /note="Description of Artificial Sequence: Synthetic peptide"
RASQSVNRHLA

SEQ ID NO: 3439 - DNA, 33 bp, Artificial Sequence
  source: /note="Description of Artificial Sequence: Synthetic oligonucleotide"
agggccagtcagagtgttcatagacacttagcc

SEQ ID NO: 3440 - protein, 11 aa, Artificial Sequence
  source: /note="Description of Artificial Sequence: Synthetic peptide"
RASQSVHRHLA

SEQ ID NO: 3441 - DNA, 33 bp, Artificial Sequence
  source: /note="Description of Artificial Sequence: Synthetic oligonucleotide"
agggccagtcagagtgttgaaagacacttagcc

SEQ ID NO: 3442 - protein, 11 aa, Artificial Sequence
  source: /note="Description of Artificial Sequence: Synthetic peptide"
RASQSVERHLA

SEQ ID NO: 3443 - DNA, 33 bp, Artificial Sequence
  source: /note="Description of Artificial Sequence: Synthetic oligonucleotide"
agggccagtcagagtgttttcagacacttagcc

SEQ ID NO: 3444 - protein, 11 aa, Artificial Sequence
  source: /note="Description of Artificial Sequence: Synthetic peptide"
RASQSVFRHLA

SEQ ID NO: 3445 - DNA, 33 bp, Artificial Sequence; identical to SEQ ID NO: 3437
  source: /note="Description of Artificial Sequence: Synthetic oligonucleotide"

SEQ ID NO: 3446 - protein, 11 aa, Artificial Sequence
  source: /note="Description of Artificial Sequence: Synthetic peptide"
RASQSVNRHLA

SEQ ID NO: 3447 - DNA, 33 bp, Artificial Sequence; identical to SEQ ID NO: 3441
  source: /note="Description of Artificial Sequence: Synthetic oligonucleotide"

SEQ ID NO: 3448 - protein, 11 aa, Artificial Sequence
  source: /note="Description of Artificial Sequence: Synthetic peptide"
RASQSVERHLA

SEQ ID NO: 3449 - DNA, 33 bp, Artificial Sequence; identical to SEQ ID NO: 3435
  source: /note="Description of Artificial Sequence: Synthetic oligonucleotide"

SEQ ID NO: 3450 - protein, 11 aa, Artificial Sequence
  source: /note="Description of Artificial Sequence: Synthetic peptide"
RASQSVDRHLA

SEQ ID NO: 3451 - DNA, 33 bp, Artificial Sequence
  source: /note="Description of Artificial Sequence: Synthetic oligonucleotide"
agggccagtcagagtgttctgagtcacttagcc

SEQ ID NO: 3452 - protein, 11 aa, Artificial Sequence
  source: /note="Description of Artificial Sequence: Synthetic peptide"
RASQSVLSHLA

SEQ ID NO: 3453 - DNA, 33 bp, Artificial Sequence; identical to SEQ ID NO: 3451
  source: /note="Description of Artificial Sequence: Synthetic oligonucleotide"

SEQ ID NO: 3454 - protein, 11 aa, Artificial Sequence
  source: /note="Description of Artificial Sequence: Synthetic peptide"
RASQSVLSHLA

SEQ ID NO: 3455 - DNA, 33 bp, Artificial Sequence
  source: /note="Description of Artificial Sequence: Synthetic oligonucleotide"
agggccagtcagagtgttatgagtcacttagcc

SEQ ID NO: 3456 - protein, 11 aa, Artificial Sequence
  source: /note="Description of Artificial Sequence: Synthetic peptide"
RASQSVMSHLA

SEQ ID NO: 3457 - DNA, 33 bp, Artificial Sequence
  source: /note="Description of Artificial Sequence: Synthetic oligonucleotide"
agggccagtcagagtgttctgacgcacttagcc

SEQ ID NO: 3458 - protein, 11 aa, Artificial Sequence
  source: /note="Description of Artificial Sequence: Synthetic peptide"
RASQSVLTHLA

SEQ ID NO: 3459 - DNA, 33 bp, Artificial Sequence
  source: /note="Description of Artificial Sequence: Synthetic oligonucleotide"
agggccagtcagagtgttgatctgcacttagcc

SEQ ID NO: 3460 - protein, 11 aa, Artificial Sequence
  source: /note="Description of Artificial Sequence: Synthetic peptide"
RASQSVDLHLA

SEQ ID NO: 3461 - DNA, 33 bp, Artificial Sequence
  source: /note="Description of Artificial Sequence: Synthetic oligonucleotide"
agggccagtcagagtgttagcgaacacttagcc

SEQ ID NO: 3462 - protein, 11 aa, Artificial Sequence
  source: /note="Description of Artificial Sequence: Synthetic peptide"
RASQSVSEHLA

SEQ ID NO: 3463 - DNA, 33 bp, Artificial Sequence; identical to SEQ ID NO: 3461
  source: /note="Description of Artificial Sequence: Synthetic oligonucleotide"

SEQ ID NO: 3464 - protein, 11 aa, Artificial Sequence
  source: /note="Description of Artificial Sequence: Synthetic peptide"
RASQSVSEHLA

SEQ ID NO: 3465 - DNA, 33 bp, Artificial Sequence
  source: /note="Description of Artificial Sequence: Synthetic oligonucleotide"
agggccagtcagagtgttagccggcacttagcc

SEQ ID NO: 3466 - protein, 11 aa, Artificial Sequence
  source: /note="Description of Artificial Sequence: Synthetic peptide"
RASQSVSRHLA

SEQ ID NO: 3467 - DNA, 33 bp, Artificial Sequence
  source: /note="Description of Artificial Sequence: Synthetic oligonucleotide"
agggccagtcagagtgttttcagccacttagcc

SEQ ID NO: 3468 - protein, 11 aa, Artificial Sequence
  source: /note="Description of Artificial Sequence: Synthetic peptide"
RASQSVFSHLA

SEQ ID NO: 3469 - DNA, 33 bp, Artificial Sequence; identical to SEQ ID NO: 3467
  source: /note="Description of Artificial Sequence: Synthetic oligonucleotide"

SEQ ID NO: 3470 - protein, 11 aa, Artificial Sequence
  source: /note="Description of Artificial Sequence: Synthetic peptide"
RASQSVFSHLA

SEQ ID NO: 3471 - DNA, 33 bp, Artificial Sequence; identical to SEQ ID NO: 3451
  source: /note="Description of Artificial Sequence: Synthetic oligonucleotide"

SEQ ID NO: 3472 - protein, 11 aa, Artificial Sequence
  source: /note="Description of Artificial Sequence: Synthetic peptide"
RASQSVLSHLA

SEQ ID NO: 3473 - DNA, 33 bp, Artificial Sequence; identical to SEQ ID NO: 3467
  source: /note="Description of Artificial Sequence: Synthetic oligonucleotide"

SEQ ID NO: 3474 - protein, 11 aa, Artificial Sequence
  source: /note="Description of Artificial Sequence: Synthetic peptide"
RASQSVFSHLA

SEQ ID NO: 3475 - DNA, 33 bp, Artificial Sequence; identical to SEQ ID NO: 3467
  source: /note="Description of Artificial Sequence: Synthetic oligonucleotide"

SEQ ID NO: 3476 - protein, 11 aa, Artificial Sequence
  source: /note="Description of Artificial Sequence: Synthetic peptide"
RASQSVFSHLA

SEQ ID NO: 3477 - DNA, 33 bp, Artificial Sequence
  source: /note="Description of Artificial Sequence: Synthetic oligonucleotide"
agggccagtcagagtgttcagagccacttagcc

SEQ ID NO: 3478 - protein, 11 aa, Artificial Sequence
  source: /note="Description of Artificial Sequence: Synthetic peptide"
RASQSVQSHLA

SEQ ID NO: 3479 - DNA, 33 bp, Artificial Sequence
  source: /note="Description of Artificial Sequence: Synthetic oligonucleotide"
agggccagtcagagtgttagtagccacttagcc

SEQ ID NO: 3480 - protein, 11 aa, Artificial Sequence
  source: /note="Description of Artificial Sequence: Synthetic peptide"
RASQSVSSHLA

SEQ ID NO: 3481 - DNA, 33 bp, Artificial Sequence
  source: /note="Description of Artificial Sequence: Synthetic oligonucleotide"
agggccagtcagagtgttttcacgcacttagcc

SEQ ID NO: 3482 - protein, 11 aa, Artificial Sequence
  source: /note="Description of Artificial Sequence: Synthetic peptide"
RASQSVFTHLA

SEQ ID NO: 3483 - DNA, 33 bp, Artificial Sequence; identical to SEQ ID NO: 3481
  source: /note="Description of Artificial Sequence: Synthetic oligonucleotide"

SEQ ID NO: 3484 - protein, 11 aa, Artificial Sequence
  source: /note="Description of Artificial Sequence: Synthetic peptide"
RASQSVFTHLA

SEQ ID NO: 3485 - DNA, 33 bp, Artificial Sequence
  source: /note="Description of Artificial Sequence: Synthetic oligonucleotide"
agggccagtcagagtgtttttgaacacttagcc

SEQ ID NO: 3486 - protein, 11 aa, Artificial Sequence
  source: /note="Description of Artificial Sequence: Synthetic peptide"
RASQSVFEHLA

SEQ ID NO: 3487 - DNA, 33 bp, Artificial Sequence
  source: /note="Description of Artificial Sequence: Synthetic oligonucleotide"
agggccagtcagagtgttgaacagcacttagcc

SEQ ID NO: 3488 - protein, 11 aa, Artificial Sequence
  source: /note="Description of Artificial Sequence: Synthetic peptide"
RASQSVEQHLA

SEQ ID NO: 3489 - DNA, 33 bp, Artificial Sequence
  source: /note="Description of Artificial Sequence: Synthetic oligonucleotide"
agggccagtcagagtgttcatagccacttagcc

SEQ ID NO: 3490 - protein, 11 aa, Artificial Sequence
  source: /note="Description of Artificial Sequence: Synthetic peptide"
RASQSVHSHLA

SEQ ID NO: 3491 - DNA, 33 bp, Artificial Sequence
  source: /note="Description of Artificial Sequence: Synthetic oligonucleotide"
agggccagtcagagtgttcatcatcacttagcc

SEQ ID NO: 3492 - protein, 11 aa, Artificial Sequence
  source: /note="Description of Artificial Sequence: Synthetic peptide"
RASQSVHHHLA

SEQ ID NO: 3493 - DNA, 33 bp, Artificial Sequence; identical to SEQ ID NO: 3489
  source: /note="Description of Artificial Sequence: Synthetic oligonucleotide"

SEQ ID NO: 3494 - protein, 11 aa, Artificial Sequence
  source: /note="Description of Artificial Sequence: Synthetic peptide"
RASQSVHSHLA

SEQ ID NO: 3495 - DNA, 33 bp, Artificial Sequence
  source: /note="Description of Artificial Sequence: Synthetic oligonucleotide"
agggccagtcagagtgttgatgtcaacttagcc

SEQ ID NO: 3496 - protein, 11 aa, Artificial Sequence
  source: /note="Description of Artificial Sequence: Synthetic peptide"
RASQSVDVNLA

SEQ ID NO: 3497 - DNA, 33 bp, Artificial Sequence
  source: /note="Description of Artificial Sequence: Synthetic oligonucleotide"
agggccagtcagagtgttgatgtccacttagcc

SEQ ID NO: 3498 - protein, 11 aa, Artificial Sequence
  source: /note="Description of Artificial Sequence: Synthetic peptide"
RASQSVDVHLA

SEQ ID NO: 3499 - DNA, 33 bp, Artificial Sequence; identical to SEQ ID NO: 3485
  source: /note="Description of Artificial Sequence: Synthetic oligonucleotide"

SEQ ID NO: 3500 - protein, 11 aa, Artificial Sequence
  source: /note="Description of Artificial Sequence: Synthetic peptide"
RASQSVFEHLA

SEQ ID NO: 3501 - DNA, 33 bp, Artificial Sequence; identical to SEQ ID NO: 3485
  source: /note="Description of Artificial Sequence: Synthetic oligonucleotide"

SEQ ID NO: 3502 - protein, 11 aa, Artificial Sequence
  source: /note="Description of Artificial Sequence: Synthetic peptide"
RASQSVFEHLA

SEQ ID NO: 3503 - DNA, 33 bp, Artificial Sequence
  source: /note="Description of Artificial Sequence: Synthetic oligonucleotide"
agggccagtcagagtgttttcgaacacttagcc

SEQ ID NO: 3504 - protein, 11 aa, Artificial Sequence
  source: /note="Description of Artificial Sequence: Synthetic peptide"
RASQSVFEHLA

SEQ ID NO: 3505 - DNA, 33 bp, Artificial Sequence
  source: /note="Description of Artificial Sequence: Synthetic oligonucleotide"
agggccagtcagagtgttctggaacacttagcc

SEQ ID NO: 3506 - protein, 11 aa, Artificial Sequence
  source: /note="Description of Artificial Sequence: Synthetic peptide"
RASQSVLEHLA

SEQ ID NO: 3507 - DNA, 33 bp, Artificial Sequence; identical to SEQ ID NO: 3435
  source: /note="Description of Artificial Sequence: Synthetic oligonucleotide"

SEQ ID NO: 3508 - protein, 11 aa, Artificial Sequence
  source: /note="Description of Artificial Sequence: Synthetic peptide"
RASQSVDRHLA

SEQ ID NO: 3509 - DNA, 33 bp, Artificial Sequence
  source: /note="Description of Artificial Sequence: Synthetic oligonucleotide"
agggccagtcagagtgttaaccggcacttagcc

SEQ ID NO: 3510 - protein, 11 aa, Artificial Sequence
  source: /note="Description of Artificial Sequence: Synthetic peptide"
RASQSVNRHLA

SEQ ID NO: 3511 - DNA, 33 bp, Artificial Sequence
  source: /note="Description of Artificial Sequence: Synthetic oligonucleotide"
agggccagtcagagtgttaacgtacacttagcc

SEQ ID NO: 3512 - protein, 11 aa, Artificial Sequence
  source: /note="Description of Artificial Sequence: Synthetic peptide"
RASQSVNVHLA

SEQ ID NO: 3513 - DNA, 33 bp, Artificial Sequence; identical to SEQ ID NO: 3457
  source: /note="Description of Artificial Sequence: Synthetic oligonucleotide"

SEQ ID NO: 3514 - protein, 11 aa, Artificial Sequence
  source: /note="Description of Artificial Sequence: Synthetic peptide"
RASQSVLTHLA

SEQ ID NO: 3515 - DNA, 33 bp, Artificial Sequence; identical to SEQ ID NO: 3457
  source: /note="Description of Artificial Sequence: Synthetic oligonucleotide"

SEQ ID NO: 3516 - protein, 11 aa, Artificial Sequence
  source: /note="Description of Artificial Sequence: Synthetic peptide"
RASQSVLTHLA

SEQ ID NO: 3517 - DNA, 33 bp, Artificial Sequence; identical to SEQ ID NO: 2208
  source: /note="Description of Artificial Sequence: Synthetic oligonucleotide"

SEQ ID NO: 3518 - protein, 11 aa, Artificial Sequence
  source: /note="Description of Artificial Sequence: Synthetic peptide"
RASQSVSSNLA

SEQ ID NO: 3519 - DNA, 33 bp, Artificial Sequence; identical to SEQ ID NO: 2208
  source: /note="Description of Artificial Sequence: Synthetic oligonucleotide"

SEQ ID NO: 3520 - protein, 11 aa, Artificial Sequence
  source: /note="Description of Artificial Sequence: Synthetic peptide"
RASQSVSSNLA

SEQ ID NO: 3521 - DNA, 33 bp, Artificial Sequence; identical to SEQ ID NO: 2208
  source: /note="Description of Artificial Sequence: Synthetic oligonucleotide"

SEQ ID NO: 3522 - protein, 11 aa, Artificial Sequence
  source: /note="Description of Artificial Sequence: Synthetic peptide"
RASQSVSSNLA

SEQ ID NO: 3523 - DNA, 33 bp, Artificial Sequence; identical to SEQ ID NO: 2208
  source: /note="Description of Artificial Sequence: Synthetic oligonucleotide"

SEQ ID NO: 3524 - protein, 11 aa, Artificial Sequence
  source: /note="Description of Artificial Sequence: Synthetic peptide"
RASQSVSSNLA

SEQ ID NO: 3525 - DNA, 33 bp, Artificial Sequence; identical to SEQ ID NO: 2208
  source: /note="Description of Artificial Sequence: Synthetic oligonucleotide"

SEQ ID NO: 3526 - protein, 11 aa, Artificial Sequence
  source: /note="Description of Artificial Sequence: Synthetic peptide"
RASQSVSSNLA

SEQ ID NO: 3527 - DNA, 33 bp, Artificial Sequence
  source: /note="Description of Artificial Sequence: Synthetic oligonucleotide"
agggccagtcagagtgttgatgttaacttagcc

SEQ ID NO: 3528 - protein, 11 aa, Artificial Sequence
  source: /note="Description of Artificial Sequence: Synthetic peptide"
RASQSVDVNLA

SEQ ID NO: 3529 - DNA, 33 bp, Artificial Sequence; identical to SEQ ID NO: 3527
  source: /note="Description of Artificial Sequence: Synthetic oligonucleotide"

SEQ ID NO: 3530 - protein, 11 aa, Artificial Sequence
  source: /note="Description of Artificial Sequence: Synthetic peptide"
RASQSVDVNLA

SEQ ID NO: 3531 - DNA, 33 bp, Artificial Sequence
  source: /note="Description of Artificial Sequence: Synthetic oligonucleotide"
agggccagtcagagtgttcatacgaacttagcc

SEQ ID NO: 3532 - protein, 11 aa, Artificial Sequence
  source: /note="Description of Artificial Sequence: Synthetic peptide"
RASQSVHTNLA

SEQ ID NO: 3533 - DNA, 33 bp, Artificial Sequence
  source: /note="Description of Artificial Sequence: Synthetic oligonucleotide"
agggccagtcagagtgttaacctgaacttagcc

SEQ ID NO: 3534 - protein, 11 aa, Artificial Sequence
  source: /note="Description of Artificial Sequence: Synthetic peptide"
RASQSVNLNLA

SEQ ID NO: 3535 - DNA, 33 bp, Artificial Sequence
  source: /note="Description of Artificial Sequence: Synthetic oligonucleotide"
agggccagtcagagtgttttccagaacttagcc

SEQ ID NO: 3536 - protein, 11 aa, Artificial Sequence
  source: /note="Description of Artificial Sequence: Synthetic peptide"
RASQSVFQNLA

SEQ ID NO: 3537 - DNA, 33 bp, Artificial Sequence; identical to SEQ ID NO: 3435
  source: /note="Description of Artificial Sequence: Synthetic oligonucleotide"

SEQ ID NO: 3538 - protein, 11 aa, Artificial Sequence
  source: /note="Description of Artificial Sequence: Synthetic peptide"
RASQSVDRHLA

SEQ ID NO: 3539 - DNA, 33 bp, Artificial Sequence; identical to SEQ ID NO: 3435
  source: /note="Description of Artificial Sequence: Synthetic oligonucleotide"

SEQ ID NO: 3540 - protein, 11 aa, Artificial Sequence
  source: /note="Description of Artificial Sequence: Synthetic peptide"
RASQSVDRHLA

SEQ ID NO: 3541 - DNA, 33 bp, Artificial Sequence; identical to SEQ ID NO: 3509
  source: /note="Description of Artificial Sequence: Synthetic oligonucleotide"

SEQ ID NO: 3542 - protein, 11 aa, Artificial Sequence
  source: /note="Description of Artificial Sequence: Synthetic peptide"
RASQSVNRHLA

SEQ ID NO: 3543 - DNA, 33 bp, Artificial Sequence; identical to SEQ ID NO: 3441
  source: /note="Description of Artificial Sequence: Synthetic oligonucleotide"

SEQ ID NO: 3544 - protein, 11 aa, Artificial Sequence
  source: /note="Description of Artificial Sequence: Synthetic peptide"
RASQSVERHLA

SEQ ID NO: 3545 - DNA, 33 bp, Artificial Sequence; identical to SEQ ID NO: 3443
  source: /note="Description of Artificial Sequence: Synthetic oligonucleotide"

SEQ ID NO: 3546 - protein, 11 aa, Artificial Sequence
  source: /note="Description of Artificial Sequence: Synthetic peptide"
RASQSVFRHLA

SEQ ID NO: 3547 - DNA, 33 bp, Artificial Sequence; identical to SEQ ID NO: 3451
  source: /note="Description of Artificial Sequence: Synthetic oligonucleotide"

SEQ ID NO: 3548 - protein, 11 aa, Artificial Sequence
  source: /note="Description of Artificial Sequence: Synthetic peptide"
RASQSVLSHLA

SEQ ID NO: 3549 - DNA, 33 bp, Artificial Sequence; identical to SEQ ID NO: 3437
  source: /note="Description of Artificial Sequence: Synthetic oligonucleotide"

SEQ ID NO: 3550 - protein, 11 aa, Artificial Sequence
  source: /note="Description of Artificial Sequence: Synthetic peptide"
RASQSVNRHLA

SEQ ID NO: 3551 - DNA, 33 bp, Artificial Sequence
  source: /note="Description of Artificial Sequence: Synthetic oligonucleotide"
agggccagtcagagtgttaccagccacttagcc

SEQ ID NO: 3552 - protein, 11 aa, Artificial Sequence
  source: /note="Description of Artificial Sequence: Synthetic peptide"
RASQSVTSHLA

SEQ ID NO: 3553 - DNA, 33 bp, Artificial Sequence
  source: /note="Description of Artificial Sequence: Synthetic oligonucleotide"
agggccagtcagagtgttgatcagcacttagcc

SEQ ID NO: 3554 - protein, 11 aa, Artificial Sequence
  source: /note="Description of Artificial Sequence: Synthetic peptide"
RASQSVDQHLA

SEQ ID NO: 3555 - protein, 11 aa, Artificial Sequence
  source: /note="Description of Artificial Sequence: Synthetic peptide"
RASQSVSEHLA

SEQ ID NO: 3556 - protein, 11 aa, Artificial Sequence
  source: /note="Description of Artificial Sequence: Synthetic peptide"
RASQSVSSNLA

SEQ ID NO: 3557 - protein, 11 aa, Artificial Sequence
  source: /note="Description of Artificial Sequence: Synthetic peptide"
RASQSVSSNLA

SEQ ID NO: 3558 - protein, 11 aa, Artificial Sequence
  source: /note="Description of Artificial Sequence: Synthetic peptide"
RASQSVSEHLA

SEQ ID NO: 3559 - protein, 11 aa, Artificial Sequence
  source: /note="Description of Artificial Sequence: Synthetic peptide"
RASQSVSSNLA

SEQ ID NO: 3560 - protein, 11 aa, Artificial Sequence
  source: /note="Description of Artificial Sequence: Synthetic peptide"
RASQSVDLHLA

SEQ ID NO: 3561 - protein, 11 aa, Artificial Sequence
  source: /note="Description of Artificial Sequence: Synthetic peptide"
RASQSVNLNLA

SEQ ID NO: 3562 - protein, 11 aa, Artificial Sequence
  source: /note="Description of Artificial Sequence: Synthetic peptide"
RASQSVFSHLA

SEQ ID NO: 3563 - DNA, 21 bp, Artificial Sequence
  source: /note="Description of Artificial Sequence: Synthetic oligonucleotide"
gaagcagccaccagggccact

SEQ ID NO: 3564 - protein, 7 aa, Artificial Sequence
  source: /note="Description of Artificial Sequence: Synthetic peptide"
EAATRAT

SEQ ID NO: 3565 - DNA, 21 bp, Artificial Sequence
  source: /note="Description of Artificial Sequence: Synthetic oligonucleotide"
gaagcagccaccagggccact

SEQ ID NO: 3566 - protein, 7 aa, Artificial Sequence
  source: /note="Description of Artificial Sequence: Synthetic peptide"
EAATRAT

SEQ ID NO: 3567 - DNA, 21 bp, Artificial Sequence
  source: /note="Description of Artificial Sequence: Synthetic oligonucleotide"
gaagcagccaccagggccact

SEQ ID NO: 3568 - protein, 7 aa, Artificial Sequence
  source: /note="Description of Artificial Sequence: Synthetic peptide"
EAATRAT

SEQ ID NO: 3569 - DNA, 21 bp, Artificial Sequence
  source: /note="Description of Artificial Sequence: Synthetic oligonucleotide"
gaagcagccaccagggccact

SEQ ID NO: 3570 - protein, 7 aa, Artificial Sequence
  source: /note="Description of Artificial Sequence: Synthetic peptide"
EAATRAT

SEQ ID NO: 3571 - DNA, 21 bp, Artificial Sequence
  source: /note="Description of Artificial Sequence: Synthetic oligonucleotide"
gaagcagccaccagggccact

SEQ ID NO: 3572 - protein, 7 aa, Artificial Sequence
  source: /note="Description of Artificial Sequence: Synthetic peptide"
EAATRAT

SEQ ID NO: 3573 - DNA, 21 bp, Artificial Sequence
  source: /note="Description of Artificial Sequence: Synthetic oligonucleotide"
gaagcagccaccagggccact

SEQ ID NO: 3574 - protein, 7 aa, Artificial Sequence
  source: /note="Description of Artificial Sequence: Synthetic peptide"
EAATRAT

SEQ ID NO: 3575 - DNA, 21 bp, Artificial Sequence
  source: /note="Description of Artificial Sequence: Synthetic oligonucleotide"
gaagcagccaccagggccact

SEQ ID NO: 3576 - protein, 7 aa, Artificial Sequence
  source: /note="Description of Artificial Sequence: Synthetic peptide"
EAATRAT

SEQ ID NO: 3577 - DNA, 21 bp, Artificial Sequence
  source: /note="Description of Artificial Sequence: Synthetic oligonucleotide"
gaagcagccaccagggccact

SEQ ID NO: 3578 - protein, 7 aa, Artificial Sequence
  source: /note="Description of Artificial Sequence: Synthetic peptide"
EAATRAT

SEQ ID NO: 3579 - DNA, 21 bp, Artificial Sequence
  source: /note="Description of Artificial Sequence: Synthetic oligonucleotide"
gaagcagccaccagggccact

SEQ ID NO: 3580 - protein, 7 aa, Artificial Sequence
  source: /note="Description of Artificial Sequence: Synthetic peptide"
EAATRAT

SEQ ID NO: 3581 - DNA, 21 bp, Artificial Sequence
  source: /note="Description of Artificial Sequence: Synthetic oligonucleotide"
gaagcagccaccagggccact

SEQ ID NO: 3582 - protein, 7 aa, Artificial Sequence
  source: /note="Description of Artificial Sequence: Synthetic peptide"
EAATRAT

SEQ ID NO: 3583 - DNA, 21 bp, Artificial Sequence
  source: /note="Description of Artificial Sequence: Synthetic oligonucleotide"
gaagcagccaccagggccact

SEQ ID NO: 3584 - protein, 7 aa, Artificial Sequence
  source: /note="Description of Artificial Sequence: Synthetic peptide"
EAATRAT

SEQ ID NO: 3585 - DNA, 21 bp, Artificial Sequence
  source: /note="Description of Artificial Sequence: Synthetic oligonucleotide"
gaagcagccaccagggccact

SEQ ID NO: 3586 - protein, 7 aa, Artificial Sequence
  source: /note="Description of Artificial Sequence: Synthetic peptide"
EAATRAT

SEQ ID NO: 3587 - DNA, 21 bp, Artificial Sequence
  source: /note="Description of Artificial Sequence: Synthetic oligonucleotide"
gaagcagccaccagggccact

SEQ ID NO: 3588 - protein, 7 aa, Artificial Sequence
  source: /note="Description of Artificial Sequence: Synthetic peptide"
EAATRAT

SEQ ID NO: 3589 - DNA, 21 bp, Artificial Sequence
  source: /note="Description of Artificial Sequence: Synthetic oligonucleotide"
gaagcagccaccagggccact

SEQ ID NO: 3590 - protein, 7 aa, Artificial Sequence
  source: /note="Description of Artificial Sequence: Synthetic peptide"
EAATRAT

SEQ ID NO: 3591 - DNA, 21 bp, Artificial Sequence
  source: /note="Description of Artificial Sequence: Synthetic oligonucleotide"
gaagcagccaccagggccact

SEQ ID NO: 3592 - protein, 7 aa, Artificial Sequence
  source: /note="Description of Artificial Sequence: Synthetic peptide"
EAATRAT

SEQ ID NO: 3593 - DNA, 21 bp, Artificial Sequence
  source: /note="Description of Artificial Sequence: Synthetic oligonucleotide"
gaagcagccaccagggccact

SEQ ID NO: 3594 - protein, 7 aa, Artificial Sequence
  source: /note="Description of Artificial Sequence: Synthetic peptide"
EAATRAT

SEQ ID NO: 3595 - DNA, 21 bp, Artificial Sequence
  source: /note="Description of Artificial Sequence: Synthetic oligonucleotide"
gaagcagccaccagggccact

SEQ ID NO: 3596 - protein, 7 aa, Artificial Sequence
  source: /note="Description of Artificial Sequence: Synthetic peptide"
EAATRAT

SEQ ID NO: 3597 - DNA, 21 bp, Artificial Sequence
  source: /note="Description of Artificial Sequence: Synthetic oligonucleotide"
gaagcagccaccagggccact

SEQ ID NO: 3598 - protein, 7 aa, Artificial Sequence
  source: /note="Description of Artificial Sequence: Synthetic peptide"
EAATRAT

SEQ ID NO: 3599 - DNA, 21 bp, Artificial Sequence
  source: /note="Description of Artificial Sequence: Synthetic oligonucleotide"
gaagcagccaccagggccact

SEQ ID NO: 3600 - protein, 7 aa, Artificial Sequence
  source: /note="Description of Artificial Sequence: Synthetic peptide"
EAATRAT

SEQ ID NO: 3601 - DNA, 21 bp, Artificial Sequence
  source: /note="Description of Artificial Sequence: Synthetic oligonucleotide"
gaagcagccaccagggccact

SEQ ID NO: 3602 - protein, 7 aa, Artificial Sequence
  source: /note="Description of Artificial Sequence: Synthetic peptide"
EAATRAT

SEQ ID NO: 3603 - DNA, 21 bp, Artificial Sequence
  source: /note="Description of Artificial Sequence: Synthetic oligonucleotide"
gaagcagccaccagggccact

SEQ ID NO: 3604 - protein, 7 aa, Artificial Sequence
  source: /note="Description of Artificial Sequence: Synthetic peptide"
EAATRAT

SEQ ID NO: 3605 - DNA, 21 bp, Artificial Sequence
  source: /note="Description of Artificial Sequence: Synthetic oligonucleotide"
gaagcagccaccagggccact

SEQ ID NO: 3606 - protein, 7 aa, Artificial Sequence
  source: /note="Description of Artificial Sequence: Synthetic peptide"
EAATRAT

SEQ ID NO: 3607 - DNA, 21 bp, Artificial Sequence
  source: /note="Description of Artificial Sequence: Synthetic oligonucleotide"
gaagcagccaccagggccact

SEQ ID NO: 3608 - protein, 7 aa, Artificial Sequence
  source: /note="Description of Artificial Sequence: Synthetic peptide"
EAATRAT

SEQ ID NO: 3609 - DNA, 21 bp, Artificial Sequence
  source: /note="Description of Artificial Sequence: Synthetic oligonucleotide"
gaagcagccaccagggccact

SEQ ID NO: 3610 - protein, 7 aa, Artificial Sequence
  source: /note="Description of Artificial Sequence: Synthetic peptide"
EAATRAT

SEQ ID NO: 3611 - DNA, 21 bp, Artificial Sequence
  source: /note="Description of Artificial Sequence: Synthetic oligonucleotide"
gaagcagccaccagggccact

SEQ ID NO: 3612 - protein, 7 aa, Artificial Sequence
  source: /note="Description of Artificial Sequence: Synthetic peptide"
EAATRAT

SEQ ID NO: 3613 - DNA, 21 bp, Artificial Sequence
  source: /note="Description of Artificial Sequence: Synthetic oligonucleotide"
gaagcagccaccagggccact

SEQ ID NO: 3614 - protein, 7 aa, Artificial Sequence
  source: /note="Description of Artificial Sequence: Synthetic peptide"
EAATRAT

SEQ ID NO: 3615 - DNA, 21 bp, Artificial Sequence
  source: /note="Description of Artificial Sequence: Synthetic oligonucleotide"
gaagcagccaccagggccact

SEQ ID NO: 3616 - protein, 7 aa, Artificial Sequence
  source: /note="Description of Artificial Sequence: Synthetic peptide"
EAATRAT

SEQ ID NO: 3617 - DNA, 21 bp, Artificial Sequence
  source: /note="Description of Artificial Sequence: Synthetic oligonucleotide"
gaagcagccaccagggccact

SEQ ID NO: 3618 - protein, 7 aa, Artificial Sequence
  source: /note="Description of Artificial Sequence: Synthetic peptide"
EAATRAT

SEQ ID NO: 3619 - DNA, 21 bp, Artificial Sequence
  source: /note="Description of Artificial Sequence: Synthetic oligonucleotide"
gaagcagccaccagggccact

SEQ ID NO: 3620 - protein, 7 aa, Artificial Sequence
  source: /note="Description of Artificial Sequence: Synthetic peptide"
EAATRAT

SEQ ID NO: 3621 - DNA, 21 bp, Artificial Sequence
  source: /note="Description of Artificial Sequence: Synthetic oligonucleotide"
gaagcagccaccagggccact

SEQ ID NO: 3622 - protein, 7 aa, Artificial Sequence
  source: /note="Description of Artificial Sequence: Synthetic peptide"
EAATRAT

SEQ ID NO: 3623 - DNA, 21 bp, Artificial Sequence
  source: /note="Description of Artificial Sequence: Synthetic oligonucleotide"
gaagcagccaccagggccact

SEQ ID NO: 3624 - protein, 7 aa, Artificial Sequence
  source: /note="Description of Artificial Sequence: Synthetic peptide"
EAATRAT

SEQ ID NO: 3625 - DNA, 21 bp, Artificial Sequence
  source: /note="Description of Artificial Sequence: Synthetic oligonucleotide"
gaagcagccaccagggccact

SEQ ID NO: 3626 - protein, 7 aa, Artificial Sequence
  source: /note="Description of Artificial Sequence: Synthetic peptide"
EAATRAT

SEQ ID NO: 3627 - DNA, 21 bp, Artificial Sequence
  source: /note="Description of Artificial Sequence: Synthetic oligonucleotide"
gaagcagccaccagggccact

SEQ ID NO: 3628 - protein, 7 aa, Artificial Sequence
  source: /note="Description of Artificial Sequence: Synthetic peptide"
EAATRAT

SEQ ID NO: 3629 - DNA, 21 bp, Artificial Sequence
  source: /note="Description of Artificial Sequence: Synthetic oligonucleotide"
gaagcagccaccagggccact

SEQ ID NO: 3630 - protein, 7 aa, Artificial Sequence
  source: /note="Description of Artificial Sequence: Synthetic peptide"
EAATRAT

SEQ ID NO: 3631 - DNA, 21 bp, Artificial Sequence
  source: /note="Description of Artificial Sequence: Synthetic oligonucleotide"
gaagcagccaccagggccact

SEQ ID NO: 3632 - protein, 7 aa, Artificial Sequence
  source: /note="Description of Artificial Sequence: Synthetic peptide"
EAATRAT

SEQ ID NO: 3633 - DNA, 21 bp, Artificial Sequence
  source: /note="Description of Artificial Sequence: Synthetic oligonucleotide"
gaagcagccaccagggccact

SEQ ID NO: 3634 - protein, 7 aa, Artificial Sequence
  source: /note="Description of Artificial Sequence: Synthetic peptide"
EAATRAT

SEQ ID NO: 3635 - DNA, 21 bp, Artificial Sequence
  source: /note="Description of Artificial Sequence: Synthetic oligonucleotide"
gaagcagccaccagggccact

SEQ ID NO: 3636 - protein, 7 aa, Artificial Sequence
  source: /note="Description of Artificial Sequence: Synthetic peptide"
EAATRAT

SEQ ID NO: 3637 - DNA, 21 bp, Artificial Sequence
  source: /note="Description of Artificial Sequence: Synthetic oligonucleotide"
gaagcagccaccagggccact

SEQ ID NO: 3638 - protein, 7 aa, Artificial Sequence
  source: /note="Description of Artificial Sequence: Synthetic peptide"
EAATRAT

SEQ ID NO: 3639 - DNA, 21 bp, Artificial Sequence
  source: /note="Description of Artificial Sequence: Synthetic oligonucleotide"
caggcagccaccagggccact

SEQ ID NO: 3640 - protein, 7 aa, Artificial Sequence
  source: /note="Description of Artificial Sequence: Synthetic peptide"
QAATRAT

SEQ ID NO: 3641 - DNA, 21 bp, Artificial Sequence
  source: /note="Description of Artificial Sequence: Synthetic oligonucleotide"
gaagcagccaccagggccact

SEQ ID NO: 3642 - protein, 7 aa, Artificial Sequence
  source: /note="Description of Artificial Sequence: Synthetic peptide"
EAATRAT

SEQ ID NO: 3643 - DNA, 21 bp, Artificial Sequence
  source: /note="Description of Artificial Sequence: Synthetic oligonucleotide"
gaagcagccaccagggccact

SEQ ID NO: 3644 - protein, 7 aa, Artificial Sequence
  source: /note="Description of Artificial Sequence: Synthetic peptide"
EAATRAT

SEQ ID NO: 3645 - DNA, 21 bp, Artificial Sequence
  source: /note="Description of Artificial Sequence: Synthetic oligonucleotide"
ggtgcagccaccagggccact

SEQ ID NO: 3646 - protein, 7 aa, Artificial Sequence
  source: /note="Description of Artificial Sequence: Synthetic peptide"
GAATRAT

SEQ ID NO: 3647 - DNA, 21 bp, Artificial Sequence
  source: /note="Description of Artificial Sequence: Synthetic oligonucleotide"
ggtgcagccaccagggccact

SEQ ID NO: 3648 - protein, 7 aa, Artificial Sequence
  source: /note="Description of Artificial Sequence: Synthetic peptide"
GAATRAT

SEQ ID NO: 3649 - DNA, 21 bp, Artificial Sequence
  source: /note="Description of Artificial Sequence: Synthetic oligonucleotide"
ggtgcagccaccagggccact

SEQ ID NO: 3650 - protein, 7 aa, Artificial Sequence
  source: /note="Description of Artificial Sequence: Synthetic peptide"
GAATRAT

SEQ ID NO: 3651 - DNA, 21 bp, Artificial Sequence
  source: /note="Description of Artificial Sequence: Synthetic oligonucleotide"
ggtgcagccaccagggccact

SEQ ID NO: 3652 - protein, 7 aa, Artificial Sequence
  source: /note="Description of Artificial Sequence: Synthetic peptide"
GAATRAT

SEQ ID NO: 3653 - DNA, 21 bp, Artificial Sequence
  source: /note="Description of Artificial Sequence: Synthetic oligonucleotide"
gaagcagccaccagggccact

SEQ ID NO: 3654 - protein, 7 aa, Artificial Sequence
  source: /note="Description of Artificial Sequence: Synthetic peptide"
EAATRAT

SEQ ID NO: 3655 - DNA, 21 bp, Artificial Sequence
  source: /note="Description of Artificial Sequence: Synthetic oligonucleotide"
aacgcagccaccagggccact

SEQ ID NO: 3656 - protein, 7 aa, Artificial Sequence
  source: /note="Description of Artificial Sequence: Synthetic peptide"
NAATRAT

SEQ ID NO: 3657 - DNA, 21 bp, Artificial Sequence
  source: /note="Description of Artificial Sequence: Synthetic oligonucleotide"
aacgcagccaccagggccact

SEQ ID NO: 3658 - protein, 7 aa, Artificial Sequence
  source: /note="Description of Artificial Sequence: Synthetic peptide"
NAATRAT

SEQ ID NO: 3659 - DNA, 21 bp, Artificial Sequence
  source: /note="Description of Artificial Sequence: Synthetic oligonucleotide"
aacgcagccaccagggccact

SEQ ID NO: 3660 - protein, 7 aa, Artificial Sequence
  source: /note="Description of Artificial Sequence: Synthetic peptide"
NAATRAT

SEQ ID NO: 3661 - DNA, 21 bp, Artificial Sequence
  source: /note="Description of Artificial Sequence: Synthetic oligonucleotide"
caggcagccaccagggccact

SEQ ID NO: 3662 - protein, 7 aa, Artificial Sequence
  source: /note="Description of Artificial Sequence: Synthetic peptide"
QAATRAT

SEQ ID NO: 3663 - DNA, 21 bp, Artificial Sequence
  source: /note="Description of Artificial Sequence: Synthetic oligonucleotide"
caggcagccaccagggccact

SEQ ID NO: 3664 - protein, 7 aa, Artificial Sequence
  source: /note="Description of Artificial Sequence: Synthetic peptide"
QAATRAT

SEQ ID NO: 3665 - DNA, 21 bp, Artificial Sequence
  source: /note="Description of Artificial Sequence: Synthetic oligonucleotide"
gaagcagccaccagggccact

SEQ ID NO: 3666 - protein, 7 aa, Artificial Sequence
  source: /note="Description of Artificial Sequence: Synthetic peptide"
EAATRAT

SEQ ID NO: 3667 - DNA, 21 bp, Artificial Sequence
  source: /note="Description of Artificial Sequence: Synthetic oligonucleotide"
gaagcagccaccagggccact

SEQ ID NO: 3668 - protein, 7 aa, Artificial Sequence
  source: /note="Description of Artificial Sequence: Synthetic peptide"
EAATRAT

SEQ ID NO: 3669 - DNA, 21 bp, Artificial Sequence
  source: /note="Description of Artificial Sequence: Synthetic oligonucleotide"
gaagcagccaccagggccact

SEQ ID NO: 3670 - protein, 7 aa, Artificial Sequence
  source: /note="Description of Artificial Sequence: Synthetic peptide"
EAATRAT

SEQ ID NO: 3671 - DNA, 21 bp, Artificial Sequence
  source: /note="Description of Artificial Sequence: Synthetic oligonucleotide"
gaagcagccaccagggccact

SEQ ID NO: 3672 - protein, 7 aa, Artificial Sequence
  source: /note="Description of Artificial Sequence: Synthetic peptide"
EAATRAT

SEQ ID NO: 3673 - DNA, 21 bp, Artificial Sequence
  source: /note="Description of Artificial Sequence: Synthetic oligonucleotide"
gaagcagccaccagggccact

SEQ ID NO: 3674 - protein, 7 aa, Artificial Sequence
  source: /note="Description of Artificial Sequence: Synthetic peptide"
EAATRAT

SEQ ID NO: 3675 - DNA, 21 bp, Artificial Sequence
  source: /note="Description of Artificial Sequence: Synthetic oligonucleotide"
gaagcagccaccagggccact

SEQ ID NO: 3676 - protein, 7 aa, Artificial Sequence
  source: /note="Description of Artificial Sequence: Synthetic peptide"
EAATRAT

SEQ ID NO: 3677 - DNA, 21 bp, Artificial Sequence
  source: /note="Description of Artificial Sequence: Synthetic oligonucleotide"
gaagcagccaccagggccact

SEQ ID NO: 3678 - protein, 7 aa, Artificial Sequence
  source: /note="Description of Artificial Sequence: Synthetic peptide"
EAATRAT

SEQ ID NO: 3679 - DNA, 21 bp, Artificial Sequence
  source: /note="Description of Artificial Sequence: Synthetic oligonucleotide"
gaagcagccaccagggccact

SEQ ID NO: 3680 - protein, 7 aa, Artificial Sequence
  source: /note="Description of Artificial Sequence: Synthetic peptide"
EAATRAT

SEQ ID NO: 3681 - DNA, 21 bp, Artificial Sequence
  source: /note="Description of Artificial Sequence: Synthetic oligonucleotide"
caggcagccaccagggccact

SEQ ID NO: 3682 - protein, 7 aa, Artificial Sequence
  source: /note="Description of Artificial Sequence: Synthetic peptide"
QAATRAT

SEQ ID NO: 3683 - protein, 7 aa, Artificial Sequence
  source: /note="Description of Artificial Sequence: Synthetic peptide"
EAATRAT

SEQ ID NO: 3684 - protein, 7 aa, Artificial Sequence
  source: /note="Description of Artificial Sequence: Synthetic peptide"
GAATRAT

SEQ ID NO: 3685 - protein, 7 aa, Artificial Sequence
  source: /note="Description of Artificial Sequence: Synthetic peptide"
GAATRAT

SEQ ID NO: 3686 - protein, 7 aa, Artificial Sequence
  source: /note="Description of Artificial Sequence: Synthetic peptide"
EAATRAT

SEQ ID NO: 3687 - protein, 7 aa, Artificial Sequence
  source: /note="Description of Artificial Sequence: Synthetic peptide"
GAATRAT

SEQ ID NO: 3688 - protein, 7 aa, Artificial Sequence
  source: /note="Description of Artificial Sequence: Synthetic peptide"
EAATRAT

SEQ ID NO: 3689 - protein, 7 aa, Artificial Sequence
  source: /note="Description of Artificial Sequence: Synthetic peptide"
QAATRAT

SEQ ID NO: 3690 - protein, 7 aa, Artificial Sequence
  source: /note="Description of Artificial Sequence: Synthetic peptide"
EAATRAT

SEQ ID NO: 3691 - DNA, 27 bp, Artificial Sequence
  source: /note="Description of Artificial Sequence: Synthetic oligonucleotide"
cagcagtatcagaactggcctctcact

SEQ ID NO: 3692 - protein, 9 aa, Artificial Sequence
  source: /note="Description of Artificial Sequence: Synthetic peptide"
QQYQNWPLT

SEQ ID NO: 3693 - DNA, 27 bp, Artificial Sequence
  source: /note="Description of Artificial Sequence: Synthetic oligonucleotide"
cagcagtatcagaactggcctctcact

SEQ ID NO: 3694 - protein, 9 aa, Artificial Sequence
  source: /note="Description of Artificial Sequence: Synthetic peptide"
QQYQNWPLT

SEQ ID NO: 3695 - DNA, 27 bp, Artificial Sequence
  source: /note="Description of Artificial Sequence: Synthetic oligonucleotide"
cagcagtatcagaactggcctctcact

SEQ ID NO: 3696 - protein, 9 aa, Artificial Sequence
  source: /note="Description of Artificial Sequence: Synthetic peptide"
QQYQNWPLT

SEQ ID NO: 3697 - DNA, 27 bp, Artificial Sequence
  source: /note="Description of Artificial Sequence: Synthetic oligonucleotide"
cagcagtatcagaactggcctctcact

SEQ ID NO: 3698 - protein, 9 aa, Artificial Sequence
  source: /note="Description of Artificial Sequence: Synthetic peptide"
QQYQNWPLT

SEQ ID NO: 3699 - DNA, 27 bp, Artificial Sequence
  source: /note="Description of Artificial Sequence: Synthetic oligonucleotide"
cagcagtatcagaactggcctctcact

SEQ ID NO: 3700 - protein, 9 aa, Artificial Sequence
  source: /note="Description of Artificial Sequence: Synthetic peptide"
QQYQNWPLT

SEQ ID NO: 3701 - DNA, 27 bp, Artificial Sequence
  source: /note="Description of Artificial Sequence: Synthetic oligonucleotide"
cagcagtatcagaactggcctctcact

SEQ ID NO: 3702 - protein, 9 aa, Artificial Sequence
  source: /note="Description of Artificial Sequence: Synthetic peptide"
QQYQNWPLT

SEQ ID NO: 3703 - DNA, 27 bp, Artificial Sequence
  source: /note="Description of Artificial Sequence: Synthetic oligonucleotide"
cagcagtatcagaactggcctctcact

SEQ ID NO: 3704 - protein, 9 aa, Artificial Sequence
  source: /note="Description of Artificial Sequence: Synthetic peptide"
QQYQNWPLT

SEQ ID NO: 3705 - DNA, 27 bp, Artificial Sequence
  source: /note="Description of Artificial Sequence: Synthetic oligonucleotide"
cagcagtatcagaactggcctctcact

SEQ ID NO: 3706 - protein, 9 aa, Artificial Sequence
  source: /note="Description of Artificial Sequence: Synthetic peptide"
QQYQNWPLT

SEQ ID NO: 3707 - DNA, 27 bp, Artificial Sequence
  source: /note="Description of Artificial Sequence: Synthetic oligonucleotide"
cagcagtataacaactggcctctcact

SEQ ID NO: 3708 - protein, 9 aa, Artificial Sequence
  source: /note="Description of Artificial Sequence: Synthetic peptide"
QQYNNWPLT

SEQ ID NO: 3709 - DNA, 27 bp, Artificial Sequence
  source: /note="Description of Artificial Sequence: Synthetic oligonucleotide"
cagcagtatcagaactggcctctcact

SEQ ID NO: 3710 - protein, 9 aa, Artificial Sequence
  source: /note="Description of Artificial Sequence: Synthetic peptide"
QQYQNWPLT

SEQ ID NO: 3711 - DNA, 27 bp, Artificial Sequence
  source: /note="Description of Artificial Sequence: Synthetic oligonucleotide"
cagcagtatcagaactggcctctcact

SEQ ID NO: 3712 - protein, 9 aa, Artificial Sequence
  source: /note="Description of Artificial Sequence: Synthetic peptide"
QQYQNWPLT

SEQ ID NO: 3713 - DNA, 27 bp, Artificial Sequence
  source: /note="Description of Artificial Sequence: Synthetic oligonucleotide"
cagcagtatcagaactggcctctcact

SEQ ID NO: 3714 - protein, 9 aa, Artificial Sequence
  source: /note="Description of Artificial Sequence: Synthetic peptide"
QQYQNWPLT

SEQ ID NO: 3715 - DNA, 27 bp, Artificial Sequence
  source: /note="Description of Artificial Sequence: Synthetic oligonucleotide"
cagcagtatcagaactggcctctcact

SEQ ID NO: 3716 - protein, 9 aa, Artificial Sequence
  source: /note="Description of Artificial Sequence: Synthetic peptide"
QQYQNWPLT

SEQ ID NO: 3717 - DNA, 27 bp, Artificial Sequence
  source: /note="Description of Artificial Sequence: Synthetic oligonucleotide"
cagcagtatcagaactggcctctcact

SEQ ID NO: 3718 - protein, 9 aa, Artificial Sequence
  source: /note="Description of Artificial Sequence: Synthetic peptide"
QQYQNWPLT

SEQ ID NO: 3719 - DNA, 27 bp, Artificial Sequence
  source: /note="Description of Artificial Sequence: Synthetic oligonucleotide"
cagcagtatcagaactggcctctcact

SEQ ID NO: 3720 - protein, 9 aa, Artificial Sequence
  source: /note="Description of Artificial Sequence: Synthetic peptide"
QQYQNWPLT

SEQ ID NO: 3721 - DNA, 27 bp, Artificial Sequence
  source: /note="Description of Artificial Sequence: Synthetic oligonucleotide"
cagcagtatcagcactggcctctcact

SEQ ID NO: 3722 - protein, 9 aa, Artificial Sequence
  source: /note="Description of Artificial Sequence: Synthetic peptide"
QQYQHWPLT

SEQ ID NO: 3723 - DNA, 27 bp, Artificial Sequence
  source: /note="Description of Artificial Sequence: Synthetic oligonucleotide"
cagcagtatcagaactggcctctcact

SEQ ID NO: 3724 - protein, 9 aa, Artificial Sequence
  source: /note="Description of Artificial Sequence: Synthetic peptide"
QQYQNWPLT

SEQ ID NO: 3725 - DNA, 27 bp, Artificial Sequence
  source: /note="Description of Artificial Sequence: Synthetic oligonucleotide"
cagcagtatcagaactggcctctcact

SEQ ID NO: 3726 - protein, 9 aa, Artificial Sequence
  source: /note="Description of Artificial Sequence: Synthetic peptide"
QQYQNWPLT

SEQ ID NO: 3727 - DNA, 27 bp, Artificial Sequence
  source: /note="Description of Artificial Sequence: Synthetic oligonucleotide"
cagcagtatcagcagtggcctctcact

SEQ ID NO: 3728 - protein, 9 aa, Artificial Sequence
  source: /note="Description of Artificial Sequence: Synthetic peptide"
QQYQQWPLT

SEQ ID NO: 3729 - DNA, 27 bp, Artificial Sequence
  source: /note="Description of Artificial Sequence: Synthetic oligonucleotide"
cagcagtatcagcagtggcctctcact

SEQ ID NO: 3730 - protein, 9 aa, Artificial Sequence
  source: /note="Description of Artificial Sequence: Synthetic peptide"
QQYQQWPLT

SEQ ID NO: 3731 - DNA, 27 bp, Artificial Sequence
  source: /note="Description of Artificial Sequence: Synthetic oligonucleotide"
cagcagtatcagcagtggcctctcact

SEQ ID NO: 3732 - protein, 9 aa, Artificial Sequence
  source: /note="Description of Artificial Sequence: Synthetic peptide"
QQYQQWPLT

SEQ ID NO: 3733 - DNA, 27 bp, Artificial Sequence
  source: /note="Description of Artificial Sequence: Synthetic oligonucleotide"
cagcagtatcagaactggcctctcact

SEQ ID NO: 3734 - protein, 9 aa, Artificial Sequence
  source: /note="Description of Artificial Sequence: Synthetic peptide"
QQYQNWPLT

SEQ ID NO: 3735 - DNA, 27 bp, Artificial Sequence
  source: /note="Description of Artificial Sequence: Synthetic oligonucleotide"
cagcagtatcagcagtggcctctcact

SEQ ID NO: 3736 - protein, 9 aa, Artificial Sequence
  source: /note="Description of Artificial Sequence: Synthetic peptide"
QQYQQWPLT

SEQ ID NO: 3737 - DNA, 27 bp, Artificial Sequence
  source: /note="Description of Artificial Sequence: Synthetic oligonucleotide"
cagcagtataacaactggcctctcact

SEQ ID NO: 3738 - protein, 9 aa, Artificial Sequence
  source: /note="Description of Artificial Sequence: Synthetic peptide"
QQYNNWPLT

SEQ ID NO: 3739 - DNA, 27 bp, Artificial Sequence
  source: /note="Description of Artificial Sequence: Synthetic oligonucleotide"
cagcagtataacaactggcctctcact

SEQ ID NO: 3740 - protein, 9 aa, Artificial Sequence
  source: /note="Description of Artificial Sequence: Synthetic peptide"
QQYNNWPLT

SEQ ID NO: 3741 - DNA, 27 bp, Artificial Sequence
  source: /note="Description of Artificial Sequence: Synthetic oligonucleotide"
cagcagtataacaactggcctctcact

SEQ ID NO: 3742 - protein, 9 aa, Artificial Sequence
  source: /note="Description of Artificial Sequence: Synthetic peptide"
QQYNNWPLT

SEQ ID NO: 3743 - DNA, 27 bp, Artificial Sequence
  source: /note="Description of Artificial Sequence: Synthetic oligonucleotide"
cagcagtataacaactggcctctcact

SEQ ID NO: 3744 - protein, 9 aa, Artificial Sequence
  source: /note="Description of Artificial Sequence: Synthetic peptide"
QQYNNWPLT

SEQ ID NO: 3745 - DNA, 27 bp, Artificial Sequence
  source: /note="Description of Artificial Sequence: Synthetic oligonucleotide"
cagcagtataaccagtggcctctcact

SEQ ID NO: 3746 - protein, 9 aa, Artificial Sequence
  source: /note="Description of Artificial Sequence: Synthetic peptide"
QQYNQWPLT

SEQ ID NO: 3747 - DNA, 27 bp, Artificial Sequence
  source: /note="Description of Artificial Sequence: Synthetic oligonucleotide"
cagcagtataaccagtggcctctcact

SEQ ID NO: 3748 - protein, 9 aa, Artificial Sequence
  source: /note="Description of Artificial Sequence: Synthetic peptide"
QQYNQWPLT

SEQ ID NO: 3749 - DNA, 27 bp, Artificial Sequence
  source: /note="Description of Artificial Sequence: Synthetic oligonucleotide"
cagcagtataacaactggcctctcact

SEQ ID NO: 3750 - protein, 9 aa, Artificial Sequence
  source: /note="Description of Artificial Sequence: Synthetic peptide"
QQYNNWPLT

SEQ ID NO: 3751 - DNA, 27 bp, Artificial Sequence
  source: /note="Description of Artificial Sequence: Synthetic oligonucleotide"
cagcagtataaccagtggcctctcact

SEQ ID NO: 3752 - protein, 9 aa, Artificial Sequence
  source: /note="Description of Artificial Sequence: Synthetic peptide"
QQYNQWPLT

SEQ ID NO: 3753 - DNA, 27 bp, Artificial Sequence
  source: /note="Description of Artificial Sequence: Synthetic oligonucleotide"
cagcagtataaccagtggcctctcact

SEQ ID NO: 3754 - protein, 9 aa, Artificial Sequence
  source: /note="Description of Artificial Sequence: Synthetic peptide"
QQYNQWPLT

SEQ ID NO: 3755 - DNA, 27 bp, Artificial Sequence
  source: /note="Description of Artificial Sequence: Synthetic oligonucleotide"
cagcagtataacaactggcctctcact

SEQ ID NO: 3756 - protein, 9 aa, Artificial Sequence
  source: /note="Description of Artificial Sequence: Synthetic peptide"
QQYNNWPLT

SEQ ID NO: 3757 - DNA, 27 bp, Artificial Sequence
  source: /note="Description of Artificial Sequence: Synthetic oligonucleotide"
cagcagtataacaactggcctctcact

SEQ ID NO: 3758 - protein, 9 aa, Artificial Sequence
  source: /note="Description of Artificial Sequence: Synthetic peptide"
QQYNNWPLT

SEQ ID NO: 3759 - DNA, 27 bp, Artificial Sequence
  source: /note="Description of Artificial Sequence: Synthetic oligonucleotide"
cagcagtataaccagtggcctctcact

SEQ ID NO: 3760 - protein, 9 aa, Artificial Sequence
  source: /note="Description of Artificial Sequence: Synthetic peptide"
QQYNQWPLT

SEQ ID NO: 3761 - DNA, 27 bp, Artificial Sequence
  source: /note="Description of Artificial Sequence: Synthetic oligonucleotide"
cagcagtataacaactggcctctcact

SEQ ID NO: 3762 - protein, 9 aa, Artificial Sequence
  source: /note="Description of Artificial Sequence: Synthetic peptide"
QQYNNWPLT

SEQ ID NO: 3763 - DNA, 27 bp, Artificial Sequence
  source: /note="Description of Artificial Sequence: Synthetic oligonucleotide"
cagcagtataaccagtggcctctcact

SEQ ID NO: 3764 - protein, 9 aa, Artificial Sequence
  source: /note="Description of Artificial Sequence: Synthetic peptide"
QQYNQWPLT

SEQ ID NO: 3765 - DNA, 27 bp, Artificial Sequence
  source: /note="Description of Artificial Sequence: Synthetic oligonucleotide"
cagcagtatcagcagtggcctctcact

SEQ ID NO: 3766 - protein, 9 aa, Artificial Sequence
  source: /note="Description of Artificial Sequence: Synthetic peptide"
QQYQQWPLT

SEQ ID NO: 3767 - DNA, 27 bp, Artificial Sequence
  source: /note="Description of Artificial Sequence: Synthetic oligonucleotide"
cagcagtataaccagtggcctctcact

SEQ ID NO: 3768 - protein, 9 aa, Artificial Sequence
  source: /note="Description of Artificial Sequence: Synthetic peptide"
QQYNQWPLT

SEQ ID NO: 3769 - DNA, 27 bp, Artificial Sequence
  source: /note="Description of Artificial Sequence: Synthetic oligonucleotide"
cagcagtatcagaactggcctctcact

SEQ ID NO: 3770 - protein, 9 aa, Artificial Sequence
  source: /note="Description of Artificial Sequence: Synthetic peptide"
QQYQNWPLT

SEQ ID NO: 3771 - DNA, 27 bp, Artificial Sequence
  source: /note="Description of Artificial Sequence: Synthetic oligonucleotide"
cagcagtatcagaactggcctctcact

SEQ ID NO: 3772 - protein, 9 aa, Artificial Sequence
  source: /note="Description of Artificial Sequence: Synthetic peptide"
QQYQNWPLT

SEQ ID NO: 3773 - DNA, 27 bp, Artificial Sequence
  source: /note="Description of Artificial Sequence: Synthetic oligonucleotide"
cagcagtataataactggcctctcact

SEQ ID NO: 3774 - protein, 9 aa, Artificial Sequence
  source: /note="Description of Artificial Sequence: Synthetic peptide"
QQYNNWPLT

SEQ ID NO: 3775 - DNA, 27 bp, Artificial Sequence
  source: /note="Description of Artificial Sequence: Synthetic oligonucleotide"
cagcagtataataactggcctctcact

SEQ ID NO: 3776 - protein, 9 aa, Artificial Sequence
  source: /note="Description of Artificial Sequence: Synthetic peptide"
QQYNNWPLT

SEQ ID NO: 3777 - DNA, 27 bp, Artificial Sequence
  source: /note="Description of Artificial Sequence: Synthetic oligonucleotide"
cagcagtataataactggcctctcact

SEQ ID NO: 3778 - protein, 9 aa, Artificial Sequence
  source: /note="Description of Artificial Sequence: Synthetic peptide"
QQYNNWPLT

SEQ ID NO: 3779 - DNA, 27 bp, Artificial Sequence
  source: /note="Description of Artificial Sequence: Synthetic oligonucleotide"
cagcagtataataactggcctctcact

SEQ ID NO: 3780 - protein, 9 aa, Artificial Sequence
  source: /note="Description of Artificial Sequence: Synthetic peptide"
QQYNNWPLT

SEQ ID NO: 3781 - DNA, 27 bp, Artificial Sequence
  source: /note="Description of Artificial Sequence: Synthetic oligonucleotide"
cagcagtataataactggcctctcact

SEQ ID NO: 3782 - protein, 9 aa, Artificial Sequence
  source: /note="Description of Artificial Sequence: Synthetic peptide"
QQYNNWPLT

SEQ ID NO: 3783 - DNA, 27 bp, Artificial Sequence
  source: /note="Description of Artificial Sequence: Synthetic oligonucleotide"
cagcagtatcagaactggcctctcact

SEQ ID NO: 3784 - protein, 9 aa, Artificial Sequence
  source: /note="Description of Artificial Sequence: Synthetic peptide"
QQYQNWPLT

SEQ ID NO: 3785 - DNA, 27 bp, Artificial Sequence
  source: /note="Description of Artificial Sequence: Synthetic oligonucleotide"
cagcagtatcagaactggcctctcact

SEQ ID NO: 3786 - protein, 9 aa, Artificial Sequence
  source: /note="Description of Artificial Sequence: Synthetic peptide"
QQYQNWPLT

SEQ ID NO: 3787 - DNA, 27 bp, Artificial Sequence
  source: /note="Description of Artificial Sequence: Synthetic oligonucleotide"
cagcagtatcagaactggcctctcact

SEQ ID NO: 3788 - protein, 9 aa, Artificial Sequence
  source: /note="Description of Artificial Sequence: Synthetic peptide"
QQYQNWPLT

SEQ ID NO: 3789 - DNA, 27 bp, Artificial Sequence
  source: /note="Description of Artificial Sequence: Synthetic oligonucleotide"
cagcagtataaccagtggcctctcact

SEQ ID NO: 3790 - protein, 9 aa, Artificial Sequence
  source: /note="Description of Artificial Sequence: Synthetic peptide"
QQYNQWPLT

SEQ ID NO: 3791 - DNA, 27 bp, Artificial Sequence
  source: /note="Description of Artificial Sequence: Synthetic oligonucleotide"
cagcagtataaccagtggcctctcact

SEQ ID NO: 3792 - protein, 9 aa, Artificial Sequence
  source: /note="Description of Artificial Sequence: Synthetic peptide"
QQYNQWPLT

SEQ ID NO: 3793 - DNA, 27 bp, Artificial Sequence
  source: /note="Description of Artificial Sequence: Synthetic oligonucleotide"
cagcagtataaccagtggcctctcact

SEQ ID NO: 3794 - protein, 9 aa, Artificial Sequence
  source: /note="Description of Artificial Sequence: Synthetic peptide"
QQYNQWPLT

SEQ ID NO: 3795 - DNA, 27 bp, Artificial Sequence
  source: /note="Description of Artificial Sequence: Synthetic oligonucleotide"
cagcagtataaccagtggcctctcact

SEQ ID NO: 3796 - protein, 9 aa, Artificial Sequence
  source: /note="Description of Artificial Sequence: Synthetic peptide"
QQYNQWPLT

SEQ ID NO: 3797 - DNA, 27 bp, Artificial Sequence
  source: /note="Description of Artificial Sequence: Synthetic oligonucleotide"
cagcagtataaccagtggcctctcact

SEQ ID NO: 3798 - protein, 9 aa, Artificial Sequence
  source: /note="Description of Artificial Sequence: Synthetic peptide"
QQYNQWPLT

SEQ ID NO: 3799 - DNA, 27 bp, Artificial Sequence
  source: /note="Description of Artificial Sequence: Synthetic oligonucleotide"
cagcagtatcagcagtggcctctcact

SEQ ID NO: 3800 - protein, 9 aa, Artificial Sequence
  source: /note="Description of Artificial Sequence: Synthetic peptide"
QQYQQWPLT

SEQ ID NO: 3801 - DNA, 27 bp, Artificial Sequence
  source: /note="Description of Artificial Sequence: Synthetic oligonucleotide"
cagcagtatcagaactggcctctcact

SEQ ID NO: 3802 - protein, 9 aa, Artificial Sequence
  source: /note="Description of Artificial Sequence: Synthetic peptide"
QQYQNWPLT

SEQ ID NO: 3803 - DNA, 27 bp, Artificial Sequence
  source: /note="Description of Artificial Sequence: Synthetic oligonucleotide"
cagcagtataacaactggcctctcact

SEQ ID NO: 3804 - protein, 9 aa, Artificial Sequence
  source: /note="Description of Artificial Sequence: Synthetic peptide"
QQYNNWPLT

SEQ ID NO: 3805 - DNA, 27 bp, Artificial Sequence
  source: /note="Description of Artificial Sequence: Synthetic oligonucleotide"
cagcagtataacaactggcctctcact

SEQ ID NO: 3806 - protein, 9 aa, Artificial Sequence
  source: /note="Description of Artificial Sequence: Synthetic peptide"
QQYNNWPLT

SEQ ID NO: 3807 - DNA, 27 bp, Artificial Sequence
  source: /note="Description of Artificial Sequence: Synthetic oligonucleotide"
cagcagtataaccagtggcctctcact

SEQ ID NO: 3808 - protein, 9 aa, Artificial Sequence
  source: /note="Description of Artificial Sequence: Synthetic peptide"
QQYNQWPLT

SEQ ID NO: 3809 - DNA, 27 bp, Artificial Sequence
  source: /note="Description of Artificial Sequence: Synthetic oligonucleotide"
cagcagtatcagaactggcctctcact

SEQ ID NO: 3810 - protein, 9 aa, Artificial Sequence
  source: /note="Description of Artificial Sequence: Synthetic peptide"
QQYQNWPLT

SEQ ID NO: 3811 - protein, 9 aa, Artificial Sequence
  source: /note="Description of Artificial Sequence: Synthetic peptide"
QQYQNWPLT

SEQ ID NO: 3812 - protein, 9 aa, Artificial Sequence
  source: /note="Description of Artificial Sequence: Synthetic peptide"
QQYNNWPLT

SEQ ID NO: 3813 - protein, 9 aa, Artificial Sequence
  source: /note="Description of Artificial Sequence: Synthetic peptide"
QQYNNWPLT

SEQ ID NO: 3814 - protein, 9 aa, Artificial Sequence
  source: /note="Description of Artificial Sequence: Synthetic peptide"
QQYQNWPLT

SEQ ID NO: 3815 - protein, 9 aa, Artificial Sequence
  source: /note="Description of Artificial Sequence: Synthetic peptide"
QQYNNWPLT

SEQ ID NO: 3816 - protein, 9 aa, Artificial Sequence
  source: /note="Description of Artificial Sequence: Synthetic peptide"
QQYQNWPLT

SEQ ID NO: 3817 - protein, 9 aa, Artificial Sequence
  source: /note="Description of Artificial Sequence: Synthetic peptide"
QQYNQWPLT

SEQ ID NO: 3818 - protein, 9 aa, Artificial Sequence
  source: /note="Description of Artificial Sequence: Synthetic peptide"
QQYQNWPLT

SEQ ID NO: 3819 - DNA, 15 bp, Artificial Sequence
  source: /note="Description of Artificial Sequence: Synthetic oligonucleotide"
aactatggcatgcac

SEQ ID NO: 3820 - protein, 5 aa, Artificial Sequence
  source: /note="Description of Artificial Sequence: Synthetic peptide"
NYGMH

SEQ ID NO: 3821 - DNA, 15 bp, Artificial Sequence
  source: /note="Description of Artificial Sequence: Synthetic oligonucleotide"
aactatggcatgcac

SEQ ID NO: 3822 - protein, 5 aa, Artificial Sequence
  source: /note="Description of Artificial Sequence: Synthetic peptide"
NYGMH

SEQ ID NO: 3823 - DNA, 15 bp, Artificial Sequence
  source: /note="Description of Artificial Sequence: Synthetic oligonucleotide"
aactatggcatgcac

SEQ ID NO: 3824 - protein, 5 aa, Artificial Sequence
  source: /note="Description of Artificial Sequence: Synthetic peptide"
NYGMH

SEQ ID NO: 3825 - DNA, 15 bp, Artificial Sequence
  source: /note="Description of Artificial Sequence: Synthetic oligonucleotide"
aactatggcatgcac

SEQ ID NO: 3826 - protein, 5 aa, Artificial Sequence
  source: /note="Description of Artificial Sequence: Synthetic peptide"
NYGMH

SEQ ID NO: 3827 - DNA, 15 bp, Artificial Sequence
  source: /note="Description of Artificial Sequence: Synthetic oligonucleotide"
aactatggcatgcac

SEQ ID NO: 3828 - protein, 5 aa, Artificial Sequence
  source: /note="Description of Artificial Sequence: Synthetic peptide"
NYGMH

SEQ ID NO: 3829 - DNA, 15 bp, Artificial Sequence
  source: /note="Description of Artificial Sequence: Synthetic oligonucleotide"
aactatggcatgcac

SEQ ID NO: 3830 - protein, 5 aa, Artificial Sequence
  source: /note="Description of Artificial Sequence: Synthetic peptide"
NYGMH

SEQ ID NO: 3831 - DNA, 15 bp, Artificial Sequence
  source: /note="Description of Artificial Sequence: Synthetic oligonucleotide"
aactatggcatgcac

SEQ ID NO: 3832 - protein, 5 aa, Artificial Sequence
  source: /note="Description of Artificial Sequence: Synthetic peptide"
NYGMH

SEQ ID NO: 3833 - DNA, 15 bp, Artificial Sequence
  source: /note="Description of Artificial Sequence: Synthetic oligonucleotide"
aactatggcatgcac

SEQ ID NO: 3834 - protein, 5 aa, Artificial Sequence
  source: /note="Description of Artificial Sequence: Synthetic peptide"
NYGMH

SEQ ID NO: 3835 - DNA, 15 bp, Artificial Sequence
  source: /note="Description of Artificial Sequence: Synthetic oligonucleotide"
aactatggcatgcac

SEQ ID NO: 3836 - protein, 5 aa, Artificial Sequence
  source: /note="Description of Artificial Sequence: Synthetic peptide"
NYGMH

SEQ ID NO: 3837 - DNA, 15 bp, Artificial Sequence
  source: /note="Description of Artificial Sequence: Synthetic oligonucleotide"
aactatggcatgcac

SEQ ID NO: 3838 - protein, 5 aa, Artificial Sequence
  source: /note="Description of Artificial Sequence: Synthetic peptide"
NYGMH

SEQ ID NO: 3839 - DNA, 15 bp, Artificial Sequence
  source: /note="Description of Artificial Sequence: Synthetic oligonucleotide"
aactatggcatgcac

SEQ ID NO: 3840 - protein, 5 aa, Artificial Sequence
  source: /note="Description of Artificial Sequence: Synthetic peptide"
NYGMH

SEQ ID NO: 3841 - DNA, 15 bp, Artificial Sequence
  source: /note="Description of Artificial Sequence: Synthetic oligonucleotide"
aactatggcatgcac

SEQ ID NO: 3842 - protein, 5 aa, Artificial Sequence
  source: /note="Description of Artificial Sequence: Synthetic peptide"
NYGMH

SEQ ID NO: 3843 - DNA, 15 bp, Artificial Sequence
  source: /note="Description of Artificial Sequence: Synthetic oligonucleotide"
aactatggcatgcac

SEQ ID NO: 3844 - protein, 5 aa, Artificial Sequence
  source: /note="Description of Artificial Sequence: Synthetic peptide"
NYGMH

SEQ ID NO: 3845 - DNA, 15 bp, Artificial Sequence
  source: /note="Description of Artificial Sequence: Synthetic oligonucleotide"
aactatggcatgcac

SEQ ID NO: 3846 - protein, 5 aa, Artificial Sequence
  source: /note="Description of Artificial Sequence: Synthetic peptide"
NYGMH

SEQ ID NO: 3847 - DNA, 15 bp, Artificial Sequence
  source: /note="Description of Artificial Sequence: Synthetic oligonucleotide"
aactatggcatgcac

SEQ ID NO: 3848 - protein, 5 aa, Artificial Sequence
  source: /note="Description of Artificial Sequence: Synthetic peptide"
NYGMH

SEQ ID NO: 3849 - DNA, 15 bp, Artificial Sequence
  source: /note="Description of Artificial Sequence: Synthetic oligonucleotide"
aactatggcatgcac

SEQ ID NO: 3850 - protein, 5 aa, Artificial Sequence
  source: /note="Description of Artificial Sequence: Synthetic peptide"
NYGMH

SEQ ID NO: 3851 - DNA, 15 bp, Artificial Sequence
  source: /note="Description of Artificial Sequence: Synthetic oligonucleotide"
aactatggcatgcac

SEQ ID NO: 3852 - protein, 5 aa, Artificial Sequence
  source: /note="Description of Artificial Sequence: Synthetic peptide"
NYGMH

SEQ ID NO: 3853 - DNA, 15 bp, Artificial Sequence
  source: /note="Description of Artificial Sequence: Synthetic oligonucleotide"
aactatggcatgcac

SEQ ID NO: 3854 - protein, 5 aa, Artificial Sequence
  source: /note="Description of Artificial Sequence: Synthetic peptide"
NYGMH

SEQ ID NO: 3855 - DNA, 15 bp, Artificial Sequence
  source: /note="Description of Artificial Sequence: Synthetic oligonucleotide"
aactatggcatgcac

SEQ ID NO: 3856 - protein, 5 aa, Artificial Sequence
  source: /note="Description of Artificial Sequence: Synthetic peptide"
NYGMH

SEQ ID NO: 3857 - DNA, 15 bp, Artificial Sequence
  source: /note="Description of Artificial Sequence: Synthetic oligonucleotide"
aactatggcatgcac

SEQ ID NO: 3858 - protein, 5 aa, Artificial Sequence
  source: /note="Description of Artificial Sequence: Synthetic peptide"
NYGMH

SEQ ID NO: 3859 - DNA, 15 bp, Artificial Sequence
  source: /note="Description of Artificial Sequence: Synthetic oligonucleotide"
aactatggcatgcac

SEQ ID NO: 3860 - protein, 5 aa, Artificial Sequence
  source: /note="Description of Artificial Sequence: Synthetic peptide"
NYGMH

SEQ ID NO: 3861 - DNA, 15 bp, Artificial Sequence
  source: /note="Description of Artificial Sequence: Synthetic oligonucleotide"
aactatggcatgcac

SEQ ID NO: 3862 - protein, 5 aa, Artificial Sequence
  source: /note="Description of Artificial Sequence: Synthetic peptide"
NYGMH

SEQ ID NO: 3863 - DNA, 15 bp, Artificial Sequence
  source: /note="Description of Artificial Sequence: Synthetic oligonucleotide"
aactatggcatgcac

SEQ ID NO: 3864 - protein, 5 aa, Artificial Sequence
  source: /note="Description of Artificial Sequence: Synthetic peptide"
NYGMH

SEQ ID NO: 3865 - DNA, 15 bp, Artificial Sequence
  source: /note="Description of Artificial Sequence: Synthetic oligonucleotide"
aactatggcatgcac

SEQ ID NO: 3866 - protein, 5 aa, Artificial Sequence
  source: /note="Description of Artificial Sequence: Synthetic peptide"
NYGMH

SEQ ID NO: 3867 - DNA, 15 bp, Artificial Sequence
  source: /note="Description of Artificial Sequence: Synthetic oligonucleotide"
aactatggcatgcac

SEQ ID NO: 3868 - protein, 5 aa, Artificial Sequence
  source: /note="Description of Artificial Sequence: Synthetic peptide"
NYGMH

SEQ ID NO: 3869 - DNA, 15 bp, Artificial Sequence
  source: /note="Description of Artificial Sequence: Synthetic oligonucleotide"
aactatggcatgcac

SEQ ID NO: 3870 - protein, 5 aa, Artificial Sequence
  source: /note="Description of Artificial Sequence: Synthetic peptide"
NYGMH

SEQ ID NO: 3871 - DNA, 15 bp, Artificial Sequence
  source: /note="Description of Artificial Sequence: Synthetic oligonucleotide"
aactatggcatgcac

SEQ ID NO: 3872 - protein, 5 aa, Artificial Sequence
  source: /note="Description of Artificial Sequence: Synthetic peptide"
NYGMH

SEQ ID NO: 3873 - DNA, 15 bp, Artificial Sequence
  source: /note="Description of Artificial Sequence: Synthetic oligonucleotide"
aactatggcatgcac

SEQ ID NO: 3874 - protein, 5 aa, Artificial Sequence
  source: /note="Description of Artificial Sequence: Synthetic peptide"
NYGMH

SEQ ID NO: 3875 - DNA, 15 bp, Artificial Sequence
  source: /note="Description of Artificial Sequence: Synthetic oligonucleotide"
aactatggcatgcac

SEQ ID NO: 3876 - protein, 5 aa, Artificial Sequence
  source: /note="Description of Artificial Sequence: Synthetic peptide"
NYGMH

SEQ ID NO: 3877 - DNA, 15 bp, Artificial Sequence
  source: /note="Description of Artificial Sequence: Synthetic oligonucleotide"
aactatggcatgcac

SEQ ID NO: 3878 - protein, 5 aa, Artificial Sequence
  source: /note="Description of Artificial Sequence: Synthetic peptide"
NYGMH

SEQ ID NO: 3879 - DNA, 15 bp, Artificial Sequence
  source: /note="Description of Artificial Sequence: Synthetic oligonucleotide"
aactatggcatgcac

SEQ ID NO: 3880 - protein, 5 aa, Artificial Sequence
  source: /note="Description of Artificial Sequence: Synthetic peptide"
NYGMH

SEQ ID NO: 3881 - DNA, 15 bp, Artificial Sequence
  source: /note="Description of Artificial Sequence: Synthetic oligonucleotide"
aactatggcatgcac

SEQ ID NO: 3882 - protein, 5 aa, Artificial Sequence
  source: /note="Description of Artificial Sequence: Synthetic peptide"
NYGMH

SEQ ID NO: 3883 - DNA, 15 bp, Artificial Sequence
  source: /note="Description of Artificial Sequence: Synthetic oligonucleotide"
aactatggcatgcac

SEQ ID NO: 3884 - protein, 5 aa, Artificial Sequence
  source: /note="Description of Artificial Sequence: Synthetic peptide"
NYGMH

SEQ ID NO: 3885 - DNA, 15 bp, Artificial Sequence
  source: /note="Description of Artificial Sequence: Synthetic oligonucleotide"
aactatggcatgcac

SEQ ID NO: 3886 - protein, 5 aa, Artificial Sequence
  source: /note="Description of Artificial Sequence: Synthetic peptide"
NYGMH

SEQ ID NO: 3887 - DNA, 15 bp, Artificial Sequence
  source: /note="Description of Artificial Sequence: Synthetic oligonucleotide"
aactatggcatgcac

SEQ ID NO: 3888 - protein, 5 aa, Artificial Sequence
  source: /note="Description of Artificial Sequence: Synthetic peptide"
NYGMH

SEQ ID NO: 3889 - DNA, 15 bp, Artificial Sequence
  source: /note="Description of Artificial Sequence: Synthetic oligonucleotide"
aactatggcatgcac

SEQ ID NO: 3890 - protein, 5 aa, Artificial Sequence
  source: /note="Description of Artificial Sequence: Synthetic peptide"
NYGMH

SEQ ID NO: 3891 - DNA, 15 bp, Artificial Sequence
  source: /note="Description of Artificial Sequence: Synthetic oligonucleotide"
aactatggcatgcac

SEQ ID NO: 3892 - protein, 5 aa, Artificial Sequence
  source: /note="Description of Artificial Sequence: Synthetic peptide"
NYGMH

SEQ ID NO: 3893 - DNA, 15 bp, Artificial Sequence
  source: /note="Description of Artificial Sequence: Synthetic oligonucleotide"
aactatggcatgcac

SEQ ID NO: 3894 - protein, 5 aa, Artificial Sequence
  source: /note="Description of Artificial Sequence: Synthetic peptide"
NYGMH

SEQ ID NO: 3895 - DNA, 15 bp, Artificial Sequence
  source: /note="Description of Artificial Sequence: Synthetic oligonucleotide"
aactatggcatgcac

SEQ ID NO: 3896 - protein, 5 aa, Artificial Sequence
  source: /note="Description of Artificial Sequence: Synthetic peptide"
NYGMH

SEQ ID NO: 3897 - DNA, 15 bp, Artificial Sequence
  source: /note="Description of Artificial Sequence: Synthetic oligonucleotide"
aactatggcatgcac

SEQ ID NO: 3898 - protein, 5 aa, Artificial Sequence
  source: /note="Description of Artificial Sequence: Synthetic peptide"
NYGMH

SEQ ID NO: 3899 - DNA, 15 bp, Artificial Sequence
  source: /note="Description of Artificial Sequence: Synthetic oligonucleotide"
aactatggcatgcac

SEQ ID NO: 3900 - protein, 5 aa, Artificial Sequence
  source: /note="Description of Artificial Sequence: Synthetic peptide"
NYGMH

SEQ ID NO: 3901 - DNA, 15 bp, Artificial Sequence
  source: /note="Description of Artificial Sequence: Synthetic oligonucleotide"
aactatggcatgcac

SEQ ID NO: 3902 - protein, 5 aa, Artificial Sequence
  source: /note="Description of Artificial Sequence: Synthetic peptide"
NYGMH

SEQ ID NO: 3903 - DNA, 15 bp, Artificial Sequence
  source: /note="Description of Artificial Sequence: Synthetic oligonucleotide"
aactatggcatgcac

SEQ ID NO: 3904 - protein, 5 aa, Artificial Sequence
  source: /note="Description of Artificial Sequence: Synthetic peptide"
NYGMH

SEQ ID NO: 3905 - DNA, 15 bp, Artificial Sequence
  source: /note="Description of Artificial Sequence: Synthetic oligonucleotide"
aactatggcatgcac

SEQ ID NO: 3906 - protein, 5 aa, Artificial Sequence
  source: /note="Description of Artificial Sequence: Synthetic peptide"
NYGMH

SEQ ID NO: 3907 - DNA, 15 bp, Artificial Sequence
  source: /note="Description of Artificial Sequence: Synthetic oligonucleotide"
aactatggcatgcac

SEQ ID NO: 3908 - protein, 5 aa, Artificial Sequence
  source: /note="Description of Artificial Sequence: Synthetic peptide"
NYGMH

SEQ ID NO: 3909 - DNA, 15 bp, Artificial Sequence
  source: /note="Description of Artificial Sequence: Synthetic oligonucleotide"
aactatggcatgcac

SEQ ID NO: 3910 - protein, 5 aa, Artificial Sequence
  source: /note="Description of Artificial Sequence: Synthetic peptide"
NYGMH

SEQ ID NO: 3911 - DNA, 15 bp, Artificial Sequence
  source: /note="Description of Artificial Sequence: Synthetic oligonucleotide"
aactatggcatgcac

SEQ ID NO: 3912 - protein, 5 aa, Artificial Sequence
  source: /note="Description of Artificial Sequence: Synthetic peptide"
NYGMH

SEQ ID NO: 3913 - DNA, 15 bp, Artificial Sequence
  source: /note="Description of Artificial Sequence: Synthetic oligonucleotide"
aactatggcatgcac

SEQ ID NO: 3914 - protein, 5 aa, Artificial Sequence
  source: /note="Description of Artificial Sequence: Synthetic peptide"
NYGMH

SEQ ID NO: 3915 - DNA, 15 bp, Artificial Sequence
  source: /note="Description of Artificial Sequence: Synthetic oligonucleotide"
aactatggcatgcac

SEQ ID NO: 3916 - protein, 5 aa, Artificial Sequence
  source: /note="Description of Artificial Sequence: Synthetic peptide"
NYGMH

SEQ ID NO: 3917 - DNA, 15 bp, Artificial Sequence
  source: /note="Description of Artificial Sequence: Synthetic oligonucleotide"
aactatggcatgcac

SEQ ID NO: 3918 - protein, 5 aa, Artificial Sequence
  source: /note="Description of Artificial Sequence: Synthetic peptide"
NYGMH

SEQ ID NO: 3919 - DNA, 15 bp, Artificial Sequence
  source: /note="Description of Artificial Sequence: Synthetic oligonucleotide"
aactatggcatgcac

SEQ ID NO: 3920 - protein, 5 aa, Artificial Sequence
  source: /note="Description of Artificial Sequence: Synthetic peptide"
NYGMH

SEQ ID NO: 3921 - DNA, 15 bp, Artificial Sequence
  source: /note="Description of Artificial Sequence: Synthetic oligonucleotide"
aactatggcatgcac

SEQ ID NO: 3922 - protein, 5 aa, Artificial Sequence
  source: /note="Description of Artificial Sequence: Synthetic peptide"
NYGMH

SEQ ID NO: 3923 - DNA, 15 bp, Artificial Sequence
  source: /note="Description of Artificial Sequence: Synthetic oligonucleotide"
aactatggcatgcac

SEQ ID NO: 3924 - protein, 5 aa, Artificial Sequence
  source: /note="Description of Artificial Sequence: Synthetic peptide"
NYGMH

SEQ ID NO: 3925 - DNA, 15 bp, Artificial Sequence
  source: /note="Description of Artificial Sequence: Synthetic oligonucleotide"
aactatggcatgcac

SEQ ID NO: 3926 - protein, 5 aa, Artificial Sequence
  source: /note="Description of Artificial Sequence: Synthetic peptide"
NYGMH

SEQ ID NO: 3927 - DNA, 15 bp, Artificial Sequence
  source: /note="Description of Artificial Sequence: Synthetic oligonucleotide"
aactatggcatgcac

SEQ ID NO: 3928 - protein, 5 aa, Artificial Sequence
  source: /note="Description of Artificial Sequence: Synthetic peptide"
NYGMH

SEQ ID NO: 3929 - DNA, 15 bp, Artificial Sequence
  source: /note="Description of Artificial Sequence: Synthetic oligonucleotide"
aactatggcatgcac

SEQ ID NO: 3930 - protein, 5 aa, Artificial Sequence
  source: /note="Description of Artificial Sequence: Synthetic peptide"
NYGMH

SEQ ID NO: 3931 - DNA, 15 bp, Artificial Sequence
  source: /note="Description of Artificial Sequence: Synthetic oligonucleotide"
aactatggcatgcac

SEQ ID NO: 3932 - protein, 5 aa, Artificial Sequence
  source: /note="Description of Artificial Sequence: Synthetic peptide"
NYGMH

SEQ ID NO: 3933 - DNA, 15 bp, Artificial Sequence
  source: /note="Description of Artificial Sequence: Synthetic oligonucleotide"
aactatggcatgcac

SEQ ID NO: 3934 - protein, 5 aa, Artificial Sequence
  source: /note="Description of Artificial Sequence: Synthetic peptide"
NYGMH

SEQ ID NO: 3935 - DNA, 15 bp, Artificial Sequence
  source: /note="Description of Artificial Sequence: Synthetic oligonucleotide"
aactatggcatgcac

SEQ ID NO: 3936 - protein, 5 aa, Artificial Sequence
  source: /note="Description of Artificial Sequence: Synthetic peptide"
NYGMH

SEQ ID NO: 3937 - DNA, 15 bp, Artificial Sequence
  source: /note="Description of Artificial Sequence: Synthetic oligonucleotide"
aactatggcatgcac

SEQ ID NO: 3938 - protein, 5 aa, Artificial Sequence
  source: /note="Description of Artificial Sequence: Synthetic peptide"
NYGMH

SEQ ID NO: 3939 - protein, 5 aa, Artificial Sequence
  source: /note="Description of Artificial Sequence: Synthetic peptide"
NYGMH

SEQ ID NO: 3940 - protein, 5 aa, Artificial Sequence
  source: /note="Description of Artificial Sequence: Synthetic peptide"
NYGMH

SEQ ID NO: 3941 - protein, 5 aa, Artificial Sequence
  source: /note="Description of Artificial Sequence: Synthetic peptide"
NYGMH

SEQ ID NO: 3942 - protein, 5 aa, Artificial Sequence
  source: /note="Description of Artificial Sequence: Synthetic peptide"
NYGMH

SEQ ID NO: 3943 - protein, 5 aa, Artificial Sequence
  source: /note="Description of Artificial Sequence: Synthetic peptide"
NYGMH

SEQ ID NO: 3944 - protein, 5 aa, Artificial Sequence
  source: /note="Description of Artificial Sequence: Synthetic peptide"
NYGMH

SEQ ID NO: 3945 - protein, 5 aa, Artificial Sequence
  source: /note="Description of Artificial Sequence: Synthetic peptide"
NYGMH

SEQ ID NO: 3946 - protein, 5 aa, Artificial Sequence
  source: /note="Description of Artificial Sequence: Synthetic peptide"
NYGMH

SEQ ID NO: 3947 - DNA, 51 bp, Artificial Sequence; identical to SEQ ID NO: 2897
  source: /note="Description of Artificial Sequence: Synthetic oligonucleotide"

SEQ ID NO: 3948 - protein, 17 aa, Artificial Sequence
  source: /note="Description of Artificial Sequence: Synthetic peptide"
AIWFDASDKYYADAVKG

SEQ ID NO: 3949 - DNA, 51 bp, Artificial Sequence; identical to SEQ ID NO: 2897
  source: /note="Description of Artificial Sequence: Synthetic oligonucleotide"

SEQ ID NO: 3950 - protein, 17 aa, Artificial Sequence
  source: /note="Description of Artificial Sequence: Synthetic peptide"
AIWFDASDKYYADAVKG

SEQ ID NO: 3951 - DNA, 51 bp, Artificial Sequence; identical to SEQ ID NO: 2897
  source: /note="Description of Artificial Sequence: Synthetic oligonucleotide"

SEQ ID NO: 3952 - protein, 17 aa, Artificial Sequence
  source: /note="Description of Artificial Sequence: Synthetic peptide"
AIWFDASDKYYADAVKG

SEQ ID NO: 3953 - DNA, 51 bp, Artificial Sequence; identical to SEQ ID NO: 2897
  source: /note="Description of Artificial Sequence: Synthetic oligonucleotide"

SEQ ID NO: 3954 - protein, 17 aa, Artificial Sequence
  source: /note="Description of Artificial Sequence: Synthetic peptide"
AIWFDASDKYYADAVKG

SEQ ID NO: 3955 - DNA, 51 bp, Artificial Sequence; identical to SEQ ID NO: 2897
  source: /note="Description of Artificial Sequence: Synthetic oligonucleotide"

SEQ ID NO: 3956 - protein, 17 aa, Artificial Sequence
  source: /note="Description of Artificial Sequence: Synthetic peptide"
AIWFDASDKYYADAVKG

SEQ ID NO: 3957 - DNA, 51 bp, Artificial Sequence; identical to SEQ ID NO: 2897
  source: /note="Description of Artificial Sequence: Synthetic oligonucleotide"

SEQ ID NO: 3958 - protein, 17 aa, Artificial Sequence
  source: /note="Description of Artificial Sequence: Synthetic peptide"
AIWFDASDKYYADAVKG

SEQ ID NO: 3959 - DNA, 51 bp, Artificial Sequence; identical to SEQ ID NO: 2897
  source: /note="Description of Artificial Sequence: Synthetic oligonucleotide"

SEQ ID NO: 3960 - protein, 17 aa, Artificial Sequence
  source: /note="Description of Artificial Sequence: Synthetic peptide"
AIWFDASDKYYADAVKG

SEQ ID NO: 3961 - DNA, 51 bp, Artificial Sequence; identical to SEQ ID NO: 2897
  source: /note="Description of Artificial Sequence: Synthetic oligonucleotide"

SEQ ID NO: 3962 - protein, 17 aa, Artificial Sequence
  source: /note="Description of Artificial Sequence: Synthetic peptide"
AIWFDASDKYYADAVKG

SEQ ID NO: 3963 - DNA, 51 bp, Artificial Sequence; identical to SEQ ID NO: 2897
  source: /note="Description of Artificial Sequence: Synthetic oligonucleotide"

SEQ ID NO: 3964 - protein, 17 aa, Artificial Sequence
  source: /note="Description of Artificial Sequence: Synthetic peptide"
AIWFDASDKYYADAVKG

SEQ ID NO: 3965 - DNA, 51 bp, Artificial Sequence; identical to SEQ ID NO: 2897
  source: /note="Description of Artificial Sequence: Synthetic oligonucleotide"

SEQ ID NO: 3966 - protein, 17 aa, Artificial Sequence
  source: /note="Description of Artificial Sequence: Synthetic peptide"
AIWFDASDKYYADAVKG

SEQ ID NO: 3967 - DNA, 51 bp, Artificial Sequence; identical to SEQ ID NO: 2897
  source: /note="Description of Artificial Sequence: Synthetic oligonucleotide"

SEQ ID NO: 3968 - protein, 17 aa, Artificial Sequence
  source: /note="Description of Artificial Sequence: Synthetic peptide"
AIWFDASDKYYADAVKG

SEQ ID NO: 3969 - DNA, 51 bp, Artificial Sequence; identical to SEQ ID NO: 2897
  source: /note="Description of Artificial Sequence: Synthetic oligonucleotide"

SEQ ID NO: 3970 - protein, 17 aa, Artificial Sequence
  source: /note="Description of Artificial Sequence: Synthetic peptide"
AIWFDASDKYYADAVKG

SEQ ID NO: 3971 - DNA, 51 bp, Artificial Sequence; identical to SEQ ID NO: 2897
  source: /note="Description of Artificial Sequence: Synthetic oligonucleotide"

SEQ ID NO: 3972 - protein, 17 aa, Artificial Sequence
  source: /note="Description of Artificial Sequence: Synthetic peptide"
AIWFDASDKYYADAVKG

SEQ ID NO: 3973 - DNA, 51 bp, Artificial Sequence; identical to SEQ ID NO: 2897
  source: /note="Description of Artificial Sequence: Synthetic oligonucleotide"

SEQ ID NO: 3974 - protein, 17 aa, Artificial Sequence
  source: /note="Description of Artificial Sequence: Synthetic peptide"
AIWFDASDKYYADAVKG

SEQ ID NO: 3975 - DNA, 51 bp, Artificial Sequence; identical to SEQ ID NO: 2897
  source: /note="Description of Artificial Sequence: Synthetic oligonucleotide"

SEQ ID NO: 3976 - protein, 17 aa, Artificial Sequence
  source: /note="Description of Artificial Sequence: Synthetic peptide"
AIWFDASDKYYADAVKG

SEQ ID NO: 3977 - DNA, 51 bp, Artificial Sequence; identical to SEQ ID NO: 2897
  source: /note="Description of Artificial Sequence: Synthetic oligonucleotide"

SEQ ID NO: 3978 - protein, 17 aa, Artificial Sequence
  source: /note="Description of Artificial Sequence: Synthetic peptide"
AIWFDASDKYYADAVKG

SEQ ID NO: 3979 - DNA, 51 bp, Artificial Sequence
  source: /note="Description of Artificial Sequence: Synthetic oligonucleotide"
gctatatggtttgatgcgtctgacaaatactatgcagacgccgtgaagggc

SEQ ID NO: 3980 - protein, 17 aa, Artificial Sequence
  source: /note="Description of Artificial Sequence: Synthetic peptide"
AIWFDASDKYYADAVKG

SEQ ID NO: 3981 - DNA, 51 bp, Artificial Sequence; identical to SEQ ID NO: 3979
  source: /note="Description of Artificial Sequence: Synthetic oligonucleotide"

SEQ ID NO: 3982 - protein, 17 aa, Artificial Sequence
  source: /note="Description of Artificial Sequence: Synthetic peptide"
AIWFDASDKYYADAVKG

SEQ ID NO: 3983 - DNA, 51 bp, Artificial Sequence; identical to SEQ ID NO: 3979
  source: /note="Description of Artificial Sequence: Synthetic oligonucleotide"

SEQ ID NO: 3984 - protein, 17 aa, Artificial Sequence
  source: /note="Description of Artificial Sequence: Synthetic peptide"
AIWFDASDKYYADAVKG

SEQ ID NO: 3985 - DNA, 51 bp, Artificial Sequence; identical to SEQ ID NO: 2897
  source: /note="Description of Artificial Sequence: Synthetic oligonucleotide"

SEQ ID NO: 3986 - protein, 17 aa, Artificial Sequence
  source: /note="Description of Artificial Sequence: Synthetic peptide"
AIWFDASDKYYADAVKG

SEQ ID NO: 3987 - DNA, 51 bp, Artificial Sequence; identical to SEQ ID NO: 2897
  source: /note="Description of Artificial Sequence: Synthetic oligonucleotide"

SEQ ID NO: 3988 - protein, 17 aa, Artificial Sequence
  source: /note="Description of Artificial Sequence: Synthetic peptide"
AIWFDASDKYYADAVKG

SEQ ID NO: 3989 - DNA, 51 bp, Artificial Sequence; identical to SEQ ID NO: 2897
  source: /note="Description of Artificial Sequence: Synthetic oligonucleotide"

SEQ ID NO: 3990 - protein, 17 aa, Artificial Sequence
  source: /note="Description of Artificial Sequence: Synthetic peptide"
AIWFDASDKYYADAVKG

SEQ ID NO: 3991 - DNA, 51 bp, Artificial Sequence; identical to SEQ ID NO: 2897
  source: /note="Description of Artificial Sequence: Synthetic oligonucleotide"

SEQ ID NO: 3992 - protein, 17 aa, Artificial Sequence
  source: /note="Description of Artificial Sequence: Synthetic peptide"
AIWFDASDKYYADAVKG

SEQ ID NO: 3993 - DNA, 51 bp, Artificial Sequence; identical to SEQ ID NO: 2897
  source: /note="Description of Artificial Sequence: Synthetic oligonucleotide"

SEQ ID NO: 3994 - protein, 17 aa, Artificial Sequence
  source: /note="Description of Artificial Sequence: Synthetic peptide"
AIWFDASDKYYADAVKG

SEQ ID NO: 3995 - DNA, 51 bp, Artificial Sequence; identical to SEQ ID NO: 2897
  source: /note="Description of Artificial Sequence: Synthetic oligonucleotide"

SEQ ID NO: 3996 - protein, 17 aa, Artificial Sequence
  source: /note="Description of Artificial Sequence: Synthetic peptide"
AIWFDASDKYYADAVKG

SEQ ID NO: 3997 - DNA, 51 bp, Artificial Sequence; identical to SEQ ID NO: 2897
  source: /note="Description of Artificial Sequence: Synthetic oligonucleotide"

SEQ ID NO: 3998 - protein, 17 aa, Artificial Sequence
  source: /note="Description of Artificial Sequence: Synthetic peptide"
AIWFDASDKYYADAVKG

SEQ ID NO: 3999 - DNA, 51 bp, Artificial Sequence; identical to SEQ ID NO: 2897
  source: /note="Description of Artificial Sequence: Synthetic oligonucleotide"

SEQ ID NO: 4000 - protein, 17 aa, Artificial Sequence
  source: /note="Description of Artificial Sequence: Synthetic peptide"
AIWFDASDKYYADAVKG

SEQ ID NO: 4001 - DNA, 51 bp, Artificial Sequence; identical to SEQ ID NO: 2897
  source: /note="Description of Artificial Sequence: Synthetic oligonucleotide"

SEQ ID NO: 4002 - protein, 17 aa, Artificial Sequence
  source: /note="Description of Artificial Sequence: Synthetic peptide"
AIWFDASDKYYADAVKG

SEQ ID NO: 4003 - DNA, 51 bp, Artificial Sequence; identical to SEQ ID NO: 2897
  source: /note="Description of Artificial Sequence: Synthetic oligonucleotide"

SEQ ID NO: 4004 - protein, 17 aa, Artificial Sequence
  source: /note="Description of Artificial Sequence: Synthetic peptide"
AIWFDASDKYYADAVKG

SEQ ID NO: 4005 - DNA, 51 bp, Artificial Sequence; identical to SEQ ID NO: 2897
  source: /note="Description of Artificial Sequence: Synthetic oligonucleotide"

SEQ ID NO: 4006 - protein, 17 aa, Artificial Sequence
  source: /note="Description of Artificial Sequence: Synthetic peptide"
AIWFDASDKYYADAVKG

SEQ ID NO: 4007 - DNA, 51 bp, Artificial Sequence; identical to SEQ ID NO: 2897
  source: /note="Description of Artificial Sequence: Synthetic oligonucleotide"

SEQ ID NO: 4008 - protein, 17 aa, Artificial Sequence
  source: /note="Description of Artificial Sequence: Synthetic peptide"
AIWFDASDKYYADAVKG

SEQ ID NO: 4009 - DNA, 51 bp, Artificial Sequence; identical to SEQ ID NO: 2897
  source: /note="Description of Artificial Sequence: Synthetic oligonucleotide"

SEQ ID NO: 4010 - protein, 17 aa, Artificial Sequence
  source: /note="Description of Artificial Sequence: Synthetic peptide"
AIWFDASDKYYADAVKG

SEQ ID NO: 4011 - DNA, 51 bp, Artificial Sequence; identical to SEQ ID NO: 2897
  source: /note="Description of Artificial Sequence: Synthetic oligonucleotide"

SEQ ID NO: 4012 - protein, 17 aa, Artificial Sequence
  source: /note="Description of Artificial Sequence: Synthetic peptide"
AIWFDASDKYYADAVKG

SEQ ID NO: 4013 - DNA, 51 bp, Artificial Sequence; identical to SEQ ID NO: 2897
  source: /note="Description of Artificial Sequence: Synthetic oligonucleotide"

SEQ ID NO: 4014 - protein, 17 aa, Artificial Sequence
  source: /note="Description of Artificial Sequence: Synthetic peptide"
AIWFDASDKYYADAVKG

SEQ ID NO: 4015 - DNA, 51 bp, Artificial Sequence; identical to SEQ ID NO: 2897
  source: /note="Description of Artificial Sequence: Synthetic oligonucleotide"

SEQ ID NO: 4016 - protein, 17 aa, Artificial Sequence
  source: /note="Description of Artificial Sequence: Synthetic peptide"
AIWFDASDKYYADAVKG

SEQ ID NO: 4017 - DNA, 51 bp, Artificial Sequence; identical to SEQ ID NO: 2897
  source: /note="Description of Artificial Sequence: Synthetic oligonucleotide"

SEQ ID NO: 4018 - protein, 17 aa, Artificial Sequence
  source: /note="Description of Artificial Sequence: Synthetic peptide"
AIWFDASDKYYADAVKG

SEQ ID NO: 4019 - DNA, 51 bp, Artificial Sequence; identical to SEQ ID NO: 2897
  source: /note="Description of Artificial Sequence: Synthetic oligonucleotide"

SEQ ID NO: 4020 - protein, 17 aa, Artificial Sequence
  source: /note="Description of Artificial Sequence: Synthetic peptide"
AIWFDASDKYYADAVKG

SEQ ID NO: 4021 - DNA, 51 bp, Artificial Sequence; identical to SEQ ID NO: 2897
  source: /note="Description of Artificial Sequence: Synthetic oligonucleotide"

SEQ ID NO: 4022 - protein, 17 aa, Artificial Sequence
  source: /note="Description of Artificial Sequence: Synthetic peptide"
AIWFDASDKYYADAVKG

SEQ ID NO: 4023 - DNA, 51 bp, Artificial Sequence; identical to SEQ ID NO: 2897
  source: /note="Description of Artificial Sequence: Synthetic oligonucleotide"

SEQ ID NO: 4024 - protein, 17 aa, Artificial Sequence
  source: /note="Description of Artificial Sequence: Synthetic peptide"
AIWFDASDKYYADAVKG

SEQ ID NO: 4025 - DNA, 51 bp, Artificial Sequence; identical to SEQ ID NO: 2897
  source: /note="Description of Artificial Sequence: Synthetic oligonucleotide"

SEQ ID NO: 4026 - protein, 17 aa, Artificial Sequence
  source: /note="Description of Artificial Sequence: Synthetic peptide"
AIWFDASDKYYADAVKG

SEQ ID NO: 4027 - DNA, 51 bp, Artificial Sequence; identical to SEQ ID NO: 2897
  source: /note="Description of Artificial Sequence: Synthetic oligonucleotide"

SEQ ID NO: 4028 - protein, 17 aa, Artificial Sequence
  source: /note="Description of Artificial Sequence: Synthetic peptide"
AIWFDASDKYYADAVKG

SEQ ID NO: 4029 - DNA, 51 bp, Artificial Sequence; identical to SEQ ID NO: 2897
  source: /note="Description of Artificial Sequence: Synthetic oligonucleotide"

SEQ ID NO: 4030 - protein, 17 aa, Artificial Sequence
  source: /note="Description of Artificial Sequence: Synthetic peptide"
AIWFDASDKYYADAVKG

SEQ ID NO: 4031 - DNA, 51 bp, Artificial Sequence; identical to SEQ ID NO: 2897
  source: /note="Description of Artificial Sequence: Synthetic oligonucleotide"

SEQ ID NO: 4032 - protein, 17 aa, Artificial Sequence
  source: /note="Description of Artificial Sequence: Synthetic peptide"
AIWFDASDKYYADAVKG

SEQ ID NO: 4033 - DNA, 51 bp, Artificial Sequence; identical to SEQ ID NO: 2897
  source: /note="Description of Artificial Sequence: Synthetic oligonucleotide"

SEQ ID NO: 4034 - protein, 17 aa, Artificial Sequence
  source: /note="Description of Artificial Sequence: Synthetic peptide"
AIWFDASDKYYADAVKG

SEQ ID NO: 4035 - DNA, 51 bp, Artificial Sequence; identical to SEQ ID NO: 2897
  source: /note="Description of Artificial Sequence: Synthetic oligonucleotide"

SEQ ID NO: 4036 - protein, 17 aa, Artificial Sequence
  source: /note="Description of Artificial Sequence: Synthetic peptide"
AIWFDASDKYYADAVKG

SEQ ID NO: 4037 - DNA, 51 bp, Artificial Sequence; identical to SEQ ID NO: 2897
  source: /note="Description of Artificial Sequence: Synthetic oligonucleotide"

SEQ ID NO: 4038 - protein, 17 aa, Artificial Sequence
  source: /note="Description of Artificial Sequence: Synthetic peptide"
AIWFDASDKYYADAVKG

SEQ ID NO: 4039 - DNA, 51 bp, Artificial Sequence; identical to SEQ ID NO: 2897
  source: /note="Description of Artificial Sequence: Synthetic oligonucleotide"

SEQ ID NO: 4040 - protein, 17 aa, Artificial Sequence
  source: /note="Description of Artificial Sequence: Synthetic peptide"
AIWFDASDKYYADAVKG

SEQ ID NO: 4041 - DNA, 51 bp, Artificial Sequence; identical to SEQ ID NO: 2897
  source: /note="Description of Artificial Sequence: Synthetic oligonucleotide"

SEQ ID NO: 4042 - protein, 17 aa, Artificial Sequence
  source: /note="Description of Artificial Sequence: Synthetic peptide"
AIWFDASDKYYADAVKG

SEQ ID NO: 4043 - DNA, 51 bp, Artificial Sequence; identical to SEQ ID NO: 2897
  source: /note="Description of Artificial Sequence: Synthetic oligonucleotide"

SEQ ID NO: 4044 - protein, 17 aa, Artificial Sequence
  source: /note="Description of Artificial Sequence: Synthetic peptide"
AIWFDASDKYYADAVKG

SEQ ID NO: 4045 - DNA, 51 bp, Artificial Sequence; identical to SEQ ID NO: 2897
  source: /note="Description of Artificial Sequence: Synthetic oligonucleotide"

SEQ ID NO: 4046 - protein, 17 aa, Artificial Sequence
  source: /note="Description of Artificial Sequence: Synthetic peptide"
AIWFDASDKYYADAVKG

SEQ ID NO: 4047 - DNA, 51 bp, Artificial Sequence; identical to SEQ ID NO: 2897
  source: /note="Description of Artificial Sequence: Synthetic oligonucleotide"

SEQ ID NO: 4048 - protein, 17 aa, Artificial Sequence
  source: /note="Description of Artificial Sequence: Synthetic peptide"
AIWFDASDKYYADAVKG

SEQ ID NO: 4049 - DNA, 51 bp, Artificial Sequence
  source: /note="Description of Artificial Sequence: Synthetic oligonucleotide"
gctatatggtttgatgcgtacggtaaatactatgcagacgccgtgaagggc

SEQ ID NO: 4050 - protein, 17 aa, Artificial Sequence
  source: /note="Description of Artificial Sequence: Synthetic peptide"
AIWFDAYGKYYADAVKG

SEQ ID NO: 4051 - DNA, 51 bp, Artificial Sequence; identical to SEQ ID NO: 4049
  source: /note="Description of Artificial Sequence: Synthetic oligonucleotide"

SEQ ID NO: 4052 - protein, 17 aa, Artificial Sequence
  source: /note="Description of Artificial Sequence: Synthetic peptide"
AIWFDAYGKYYADAVKG

SEQ ID NO: 4053 - DNA, 51 bp, Artificial Sequence; identical to SEQ ID NO: 4049
  source: /note="Description of Artificial Sequence: Synthetic oligonucleotide"

SEQ ID NO: 4054 - protein, 17 aa, Artificial Sequence
  source: /note="Description of Artificial Sequence: Synthetic peptide"
AIWFDAYGKYYADAVKG

SEQ ID NO: 4055 - DNA, 51 bp, Artificial Sequence; identical to SEQ ID NO: 4049
  source: /note="Description of Artificial Sequence: Synthetic oligonucleotide"

SEQ ID NO: 4056 - protein, 17 aa, Artificial Sequence
  source: /note="Description of Artificial Sequence: Synthetic peptide"
AIWFDAYGKYYADAVKG

SEQ ID NO: 4057 - DNA, 51 bp, Artificial Sequence; identical to SEQ ID NO: 4049
  source: /note="Description of Artificial Sequence: Synthetic oligonucleotide"

SEQ ID NO: 4058 - protein, 17 aa, Artificial Sequence
  source: /note="Description of Artificial Sequence: Synthetic peptide"
AIWFDAYGKYYADAVKG

SEQ ID NO: 4059 - DNA, 51 bp, Artificial Sequence
  source: /note="Description of Artificial Sequence: Synthetic oligonucleotide"
gctatatggtttgatgcgtacgacaaatactatgcagacgccgtgaagggc

SEQ ID NO: 4060 - protein, 17 aa, Artificial Sequence
  source: /note="Description of Artificial Sequence: Synthetic peptide"
AIWFDAYDKYYADAVKG

SEQ ID NO: 4061 - DNA, 51 bp, Artificial Sequence; identical to SEQ ID NO: 4059
  source: /note="Description of Artificial Sequence: Synthetic oligonucleotide"

SEQ ID NO: 4062 - protein, 17 aa, Artificial Sequence
  source: /note="Description of Artificial Sequence: Synthetic peptide"
AIWFDAYDKYYADAVKG

SEQ ID NO: 4063 - DNA, 51 bp, Artificial Sequence; identical to SEQ ID NO: 4059
  source: /note="Description of Artificial Sequence: Synthetic oligonucleotide"

SEQ ID NO: 4064 - protein, 17 aa, Artificial Sequence
  source: /note="Description of Artificial Sequence: Synthetic peptide"
AIWFDAYDKYYADAVKG

SEQ ID NO: 4065 - DNA, 51 bp, Artificial Sequence
  source: /note="Description of Artificial Sequence: Synthetic oligonucleotide"
gctatatggtttgatgcggctttcaaatactatgcagacgccgtgaagggc

SEQ ID NO: 4066 - protein, 17 aa, Artificial Sequence
  source: /note="Description of Artificial Sequence: Synthetic peptide"
AIWFDAAFKYYADAVKG

SEQ ID NO: 4067 - protein, 17 aa, Artificial Sequence
  source: /note="Description of Artificial Sequence: Synthetic peptide"
AIWFDASDKYYADAVKG

SEQ ID NO: 4068 - protein, 17 aa, Artificial Sequence
  source: /note="Description of Artificial Sequence: Synthetic peptide"
AIWFDASDKYYADAVKG

SEQ ID NO: 4069 - protein, 17 aa, Artificial Sequence
  source: /note="Description of Artificial Sequence: Synthetic peptide"
AIWFDASDKYYADAVKG

SEQ ID NO: 4070 - protein, 17 aa, Artificial Sequence
  source: /note="Description of Artificial Sequence: Synthetic peptide"
AIWFDASDKYYADAVKG

SEQ ID NO: 4071 - protein, 17 aa, Artificial Sequence
  source: /note="Description of Artificial Sequence: Synthetic peptide"
AIWFDASDKYYADAVKG

SEQ ID NO: 4072 - protein, 17 aa, Artificial Sequence
  source: /note="Description of Artificial Sequence: Synthetic peptide"
AIWFDASDKYYADAVKG

SEQ ID NO: 4073 - protein, 17 aa, Artificial Sequence
  source: /note="Description of Artificial Sequence: Synthetic peptide"
AIWFDASDKYYADAVKG

SEQ ID NO: 4074 - protein, 17 aa, Artificial Sequence
  source: /note="Description of Artificial Sequence: Synthetic peptide"
AIWFDASDKYYADAVKG

SEQ ID NO: 4075 - DNA, 33 bp, Artificial Sequence
  source: /note="Description of Artificial Sequence: Synthetic oligonucleotide"
gatttggcgatttttggagtggtccccgactac

SEQ ID NO: 4076 - protein, 11 aa, Artificial Sequence
  source: /note="Description of Artificial Sequence: Synthetic peptide"
DLAIFGVVPDY

SEQ ID NO: 4077 - DNA, 33 bp, Artificial Sequence; identical to SEQ ID NO: 4075
  source: /note="Description of Artificial Sequence: Synthetic oligonucleotide"

SEQ ID NO: 4078 - protein, 11 aa, Artificial Sequence
  source: /note="Description of Artificial Sequence: Synthetic peptide"
DLAIFGVVPDY

SEQ ID NO: 4079 - DNA, 33 bp, Artificial Sequence; identical to SEQ ID NO: 4075
  source: /note="Description of Artificial Sequence: Synthetic oligonucleotide"

SEQ ID NO: 4080 - protein, 11 aa, Artificial Sequence
  source: /note="Description of Artificial Sequence: Synthetic peptide"
DLAIFGVVPDY

SEQ ID NO: 4081 - DNA, 33 bp, Artificial Sequence; identical to SEQ ID NO: 4075
  source: /note="Description of Artificial Sequence: Synthetic oligonucleotide"

SEQ ID NO: 4082 - protein, 11 aa, Artificial Sequence
  source: /note="Description of Artificial Sequence: Synthetic peptide"
DLAIFGVVPDY

SEQ ID NO: 4083 - DNA, 33 bp, Artificial Sequence; identical to SEQ ID NO: 4075
  source: /note="Description of Artificial Sequence: Synthetic oligonucleotide"

SEQ ID NO: 4084 - protein, 11 aa, Artificial Sequence
  source: /note="Description of Artificial Sequence: Synthetic peptide"
DLAIFGVVPDY

SEQ ID NO: 4085 - DNA, 33 bp, Artificial Sequence; identical to SEQ ID NO: 4075
  source: /note="Description of Artificial Sequence: Synthetic oligonucleotide"

SEQ ID NO: 4086 - protein, 11 aa, Artificial Sequence
  source: /note="Description of Artificial Sequence: Synthetic peptide"
DLAIFGVVPDY

SEQ ID NO: 4087 - DNA, 33 bp, Artificial Sequence; identical to SEQ ID NO: 4075
  source: /note="Description of Artificial Sequence: Synthetic oligonucleotide"

SEQ ID NO: 4088 - protein, 11 aa, Artificial Sequence
  source: /note="Description of Artificial Sequence: Synthetic peptide"
DLAIFGVVPDY

SEQ ID NO: 4089 - DNA, 33 bp, Artificial Sequence; identical to SEQ ID NO: 4075
  source: /note="Description of Artificial Sequence: Synthetic oligonucleotide"

SEQ ID NO: 4090 - protein, 11 aa, Artificial Sequence
  source: /note="Description of Artificial Sequence: Synthetic peptide"
DLAIFGVVPDY

SEQ ID NO: 4091 - DNA, 33 bp, Artificial Sequence; identical to SEQ ID NO: 4075
  source: /note="Description of Artificial Sequence: Synthetic oligonucleotide"

SEQ ID NO: 4092 - protein, 11 aa, Artificial Sequence
  source: /note="Description of Artificial Sequence: Synthetic peptide"
DLAIFGVVPDY

SEQ ID NO: 4093 - DNA, 33 bp, Artificial Sequence; identical to SEQ ID NO: 4075
  source: /note="Description of Artificial Sequence: Synthetic oligonucleotide"

SEQ ID NO: 4094 - protein, 11 aa, Artificial Sequence
  source: /note="Description of Artificial Sequence: Synthetic peptide"
DLAIFGVVPDY

SEQ ID NO: 4095 - DNA, 33 bp, Artificial Sequence; identical to SEQ ID NO: 4075
  source: /note="Description of Artificial Sequence: Synthetic oligonucleotide"

SEQ ID NO: 4096 - protein, 11 aa, Artificial Sequence
  source: /note="Description of Artificial Sequence: Synthetic peptide"
DLAIFGVVPDY

SEQ ID NO: 4097 - DNA, 33 bp, Artificial Sequence; identical to SEQ ID NO: 4075
  source: /note="Description of Artificial Sequence: Synthetic oligonucleotide"

SEQ ID NO: 4098 - protein, 11 aa, Artificial Sequence
  source: /note="Description of Artificial Sequence: Synthetic peptide"
DLAIFGVVPDY

SEQ ID NO: 4099 - DNA, 33 bp, Artificial Sequence; identical to SEQ ID NO: 4075
  source: /note="Description of Artificial Sequence: Synthetic oligonucleotide"

SEQ ID NO: 4100 - protein, 11 aa, Artificial Sequence
  source: /note="Description of Artificial Sequence: Synthetic peptide"
DLAIFGVVPDY

SEQ ID NO: 4101 - DNA, 33 bp, Artificial Sequence
  source: /note="Description of Artificial Sequence: Synthetic oligonucleotide"
gatctggcgatttttggagtgattcccgactac

SEQ ID NO: 4102 - protein, 11 aa, Artificial Sequence
  source: /note="Description of Artificial Sequence: Synthetic peptide"
DLAIFGVIPDY

SEQ ID NO: 4103 - DNA, 33 bp, Artificial Sequence; identical to SEQ ID NO: 4075
  source: /note="Description of Artificial Sequence: Synthetic oligonucleotide"

SEQ ID NO: 4104 - protein, 11 aa, Artificial Sequence
  source: /note="Description of Artificial Sequence: Synthetic peptide"
DLAIFGVVPDY

SEQ ID NO: 4105 - DNA, 33 bp, Artificial Sequence; identical to SEQ ID NO: 4075
  source: /note="Description of Artificial Sequence: Synthetic oligonucleotide"

SEQ ID NO: 4106 - protein, 11 aa, Artificial Sequence
  source: /note="Description of Artificial Sequence: Synthetic peptide"
DLAIFGVVPDY

SEQ ID NO: 4107 - DNA, 33 bp, Artificial Sequence
  source: /note="Description of Artificial Sequence: Synthetic oligonucleotide"
gatcttgcgatttttggagtggtccccgactac

SEQ ID NO: 4108 - protein, 11 aa, Artificial Sequence
  source: /note="Description of Artificial Sequence: Synthetic peptide"
DLAIFGVVPDY

SEQ ID NO: 4109 - DNA, 33 bp, Artificial Sequence; identical to SEQ ID NO: 4107
  source: /note="Description of Artificial Sequence: Synthetic oligonucleotide"

SEQ ID NO: 4110 - protein, 11 aa, Artificial Sequence
  source: /note="Description of Artificial Sequence: Synthetic peptide"
DLAIFGVVPDY

SEQ ID NO: 4111 - DNA, 33 bp, Artificial Sequence; identical to SEQ ID NO: 4107
  source: /note="Description of Artificial Sequence: Synthetic oligonucleotide"

SEQ ID NO: 4112 - protein, 11 aa, Artificial Sequence
  source: /note="Description of Artificial Sequence: Synthetic peptide"
DLAIFGVVPDY

SEQ ID NO: 4113 - DNA, 33 bp, Artificial Sequence; identical to SEQ ID NO: 4075
  source: /note="Description of Artificial Sequence: Synthetic oligonucleotide"

SEQ ID NO: 4114 - protein, 11 aa, Artificial Sequence
  source: /note="Description of Artificial Sequence: Synthetic peptide"
DLAIFGVVPDY

SEQ ID NO: 4115 - DNA, 33 bp, Artificial Sequence; identical to SEQ ID NO: 4075
  source: /note="Description of Artificial Sequence: Synthetic oligonucleotide"

SEQ ID NO: 4116 - protein, 11 aa, Artificial Sequence
  source: /note="Description of Artificial Sequence: Synthetic peptide"
DLAIFGVVPDY

SEQ ID NO: 4117 - DNA, 33 bp, Artificial Sequence
  source: /note="Description of Artificial Sequence: Synthetic oligonucleotide"
gatattgcgatttttggagtggtccccgactac

SEQ ID NO: 4118 - protein, 11 aa, Artificial Sequence
  source: /note="Description of Artificial Sequence: Synthetic peptide"
DIAIFGVVPDY

SEQ ID NO: 4119 - DNA, 33 bp, Artificial Sequence; identical to SEQ ID NO: 4117
  source: /note="Description of Artificial Sequence: Synthetic oligonucleotide"

SEQ ID NO: 4120 - protein, 11 aa, Artificial Sequence
  source: /note="Description of Artificial Sequence: Synthetic peptide"
DIAIFGVVPDY

SEQ ID NO: 4121 - DNA, 33 bp, Artificial Sequence; identical to SEQ ID NO: 4075
  source: /note="Description of Artificial Sequence: Synthetic oligonucleotide"

SEQ ID NO: 4122 - protein, 11 aa, Artificial Sequence
  source: /note="Description of Artificial Sequence: Synthetic peptide"
DLAIFGVVPDY

SEQ ID NO: 4123 - DNA, 33 bp, Artificial Sequence; identical to SEQ ID NO: 4075
  source: /note="Description of Artificial Sequence: Synthetic oligonucleotide"

SEQ ID NO: 4124 - protein, 11 aa, Artificial Sequence
  source: /note="Description of Artificial Sequence: Synthetic peptide"
DLAIFGVVPDY

SEQ ID NO: 4125 - DNA, 33 bp, Artificial Sequence; identical to SEQ ID NO: 4075
  source: /note="Description of Artificial Sequence: Synthetic oligonucleotide"

SEQ ID NO: 4126 - protein, 11 aa, Artificial Sequence
  source: /note="Description of Artificial Sequence: Synthetic peptide"
DLAIFGVVPDY

SEQ ID NO: 4127 - DNA, 33 bp, Artificial Sequence; identical to SEQ ID NO: 4075
  source: /note="Description of Artificial Sequence: Synthetic oligonucleotide"

SEQ ID NO: 4128 - protein, 11 aa, Artificial Sequence
  source: /note="Description of Artificial Sequence: Synthetic peptide"
DLAIFGVVPDY

SEQ ID NO: 4129 - DNA, 33 bp, Artificial Sequence; identical to SEQ ID NO: 4075
  source: /note="Description of Artificial Sequence: Synthetic oligonucleotide"

SEQ ID NO: 4130 - protein, 11 aa, Artificial Sequence
  source: /note="Description of Artificial Sequence: Synthetic peptide"
DLAIFGVVPDY

SEQ ID NO: 4131 - DNA, 33 bp, Artificial Sequence; identical to SEQ ID NO: 4075
  source: /note="Description of Artificial Sequence: Synthetic oligonucleotide"

SEQ ID NO: 4132 - protein, 11 aa, Artificial Sequence
  source: /note="Description of Artificial Sequence: Synthetic peptide"
DLAIFGVVPDY

SEQ ID NO: 4133 - DNA, 33 bp, Artificial Sequence; identical to SEQ ID NO: 4075
  source: /note="Description of Artificial Sequence: Synthetic oligonucleotide"

SEQ ID NO: 4134 - protein, 11 aa, Artificial Sequence
  source: /note="Description of Artificial Sequence: Synthetic peptide"
DLAIFGVVPDY

SEQ ID NO: 4135 - DNA, 33 bp, Artificial Sequence; identical to SEQ ID NO: 4075
  source: /note="Description of Artificial Sequence: Synthetic oligonucleotide"

SEQ ID NO: 4136 - protein, 11 aa, Artificial Sequence
  source: /note="Description of Artificial Sequence: Synthetic peptide"
DLAIFGVVPDY

SEQ ID NO: 4137 - DNA, 33 bp, Artificial Sequence; identical to SEQ ID NO: 4075
  source: /note="Description of Artificial Sequence: Synthetic oligonucleotide"

SEQ ID NO: 4138 - protein, 11 aa, Artificial Sequence
  source: /note="Description of Artificial Sequence: Synthetic peptide"
DLAIFGVVPDY

SEQ ID NO: 4139 - DNA, 33 bp, Artificial Sequence
  source: /note="Description of Artificial Sequence: Synthetic oligonucleotide"
gatattgcgatttttggagtgtttcccgactac

SEQ ID NO: 4140 - protein, 11 aa, Artificial Sequence
  source: /note="Description of Artificial Sequence: Synthetic peptide"
DIAIFGVFPDY

SEQ ID NO: 4141 - DNA, 33 bp, Artificial Sequence; identical to SEQ ID NO: 4139
  source: /note="Description of Artificial Sequence: Synthetic oligonucleotide"

SEQ ID NO: 4142 - protein, 11 aa, Artificial Sequence
  source: /note="Description of Artificial Sequence: Synthetic peptide"
DIAIFGVFPDY

SEQ ID NO: 4143 - DNA, 33 bp, Artificial Sequence; identical to SEQ ID NO: 4117
  source: /note="Description of Artificial Sequence: Synthetic oligonucleotide"

SEQ ID NO: 4144 - protein, 11 aa, Artificial Sequence
  source: /note="Description of Artificial Sequence: Synthetic peptide"
DIAIFGVVPDY

SEQ ID NO: 4145 - DNA, 33 bp, Artificial Sequence; identical to SEQ ID NO: 4117
  source: /note="Description of Artificial Sequence: Synthetic oligonucleotide"

SEQ ID NO: 4146 - protein, 11 aa, Artificial Sequence
  source: /note="Description of Artificial Sequence: Synthetic peptide"
DIAIFGVVPDY

SEQ ID NO: 4147 - DNA, 33 bp, Artificial Sequence; identical to SEQ ID NO: 4139
  source: /note="Description of Artificial Sequence: Synthetic oligonucleotide"

SEQ ID NO: 4148 - protein, 11 aa, Artificial Sequence
  source: /note="Description of Artificial Sequence: Synthetic peptide"
DIAIFGVFPDY

SEQ ID NO: 4149 - DNA, 33 bp, Artificial Sequence; identical to SEQ ID NO: 4139
  source: /note="Description of Artificial Sequence: Synthetic oligonucleotide"

SEQ ID NO: 4150 - protein, 11 aa, Artificial Sequence
  source: /note="Description of Artificial Sequence: Synthetic peptide"
DIAIFGVFPDY

SEQ ID NO: 4151 - DNA, 33 bp, Artificial Sequence; identical to SEQ ID NO: 4139
  source: /note="Description of Artificial Sequence: Synthetic oligonucleotide"

SEQ ID NO: 4152 - protein, 11 aa, Artificial Sequence
  source: /note="Description of Artificial Sequence: Synthetic peptide"
DIAIFGVFPDY

SEQ ID NO: 4153 - DNA, 33 bp, Artificial Sequence
  source: /note="Description of Artificial Sequence: Synthetic oligonucleotide"
gatattgcgatttttggagtgatccccgactac

SEQ ID NO: 4154 - protein, 11 aa, Artificial Sequence
  source: /note="Description of Artificial Sequence: Synthetic peptide"
DIAIFGVIPDY

SEQ ID NO: 4155 - DNA, 33 bp, Artificial Sequence; identical to SEQ ID NO: 4153
  source: /note="Description of Artificial Sequence: Synthetic oligonucleotide"

SEQ ID NO: 4156 - protein, 11 aa, Artificial Sequence
  source: /note="Description of Artificial Sequence: Synthetic peptide"
DIAIFGVIPDY

SEQ ID NO: 4157 - DNA, 33 bp, Artificial Sequence; identical to SEQ ID NO: 4075
  source: /note="Description of Artificial Sequence: Synthetic oligonucleotide"

SEQ ID NO: 4158 - protein, 11 aa, Artificial Sequence
  source: /note="Description of Artificial Sequence: Synthetic peptide"
DLAIFGVVPDY

SEQ ID NO: 4159 - DNA, 33 bp, Artificial Sequence
  source: /note="Description of Artificial Sequence: Synthetic oligonucleotide"
gatcaggcgatttttggagtggtccccgattac

SEQ ID NO: 4160 - protein, 11 aa, Artificial Sequence
  source: /note="Description of Artificial Sequence: Synthetic peptide"
DQAIFGVVPDY

SEQ ID NO: 4161 - DNA, 33 bp, Artificial Sequence; identical to SEQ ID NO: 4117
  source: /note="Description of Artificial Sequence: Synthetic oligonucleotide"

SEQ ID NO: 4162 - protein, 11 aa, Artificial Sequence
  source: /note="Description of Artificial Sequence: Synthetic peptide"
DIAIFGVVPDY

SEQ ID NO: 4163 - DNA, 33 bp, Artificial Sequence; identical to SEQ ID NO: 4075
  source: /note="Description of Artificial Sequence: Synthetic oligonucleotide"

SEQ ID NO: 4164 - protein, 11 aa, Artificial Sequence
  source: /note="Description of Artificial Sequence: Synthetic peptide"
DLAIFGVVPDY

SEQ ID NO: 4165 - DNA, 33 bp, Artificial Sequence; identical to SEQ ID NO: 4159
  source: /note="Description of Artificial Sequence: Synthetic oligonucleotide"

SEQ ID NO: 4166 - protein, 11 aa, Artificial Sequence
  source: /note="Description of Artificial Sequence: Synthetic peptide"
DQAIFGVVPDY

SEQ ID NO: 4167 - DNA, 33 bp, Artificial Sequence; identical to SEQ ID NO: 4075
  source: /note="Description of Artificial Sequence: Synthetic oligonucleotide"

SEQ ID NO: 4168 - protein, 11 aa, Artificial Sequence
  source: /note="Description of Artificial Sequence: Synthetic peptide"
DLAIFGVVPDY

SEQ ID NO: 4169 - DNA, 33 bp, Artificial Sequence; identical to SEQ ID NO: 4075
  source: /note="Description of Artificial Sequence: Synthetic oligonucleotide"

SEQ ID NO: 4170 - protein, 11 aa, Artificial Sequence
  source: /note="Description of Artificial Sequence: Synthetic peptide"
DLAIFGVVPDY

SEQ ID NO: 4171 - DNA, 33 bp, Artificial Sequence; identical to SEQ ID NO: 4117
  source: /note="Description of Artificial Sequence: Synthetic oligonucleotide"

SEQ ID NO: 4172 - protein, 11 aa, Artificial Sequence
  source: /note="Description of Artificial Sequence: Synthetic peptide"
DIAIFGVVPDY

SEQ ID NO: 4173 - DNA, 33 bp, Artificial Sequence; identical to SEQ ID NO: 4075
  source: /note="Description of Artificial Sequence: Synthetic oligonucleotide"

SEQ ID NO: 4174 - protein, 11 aa, Artificial Sequence
  source: /note="Description of Artificial Sequence: Synthetic peptide"
DLAIFGVVPDY

SEQ ID NO: 4175 - DNA, 33 bp, Artificial Sequence; identical to SEQ ID NO: 4117
  source: /note="Description of Artificial Sequence: Synthetic oligonucleotide"

SEQ ID NO: 4176 - protein, 11 aa, Artificial Sequence
  source: /note="Description of Artificial Sequence: Synthetic peptide"
DIAIFGVVPDY

SEQ ID NO: 4177 - DNA, 33 bp, Artificial Sequence
  source: /note="Description of Artificial Sequence: Synthetic oligonucleotide"
gatcagacgatttttggagtggtccccgactac

SEQ ID NO: 4178 - protein, 11 aa, Artificial Sequence
  source: /note="Description of Artificial Sequence: Synthetic peptide"
DQTIFGVVPDY

SEQ ID NO: 4179 - DNA, 33 bp, Artificial Sequence; identical to SEQ ID NO: 4177
  source: /note="Description of Artificial Sequence: Synthetic oligonucleotide"

SEQ ID NO: 4180 - protein, 11 aa, Artificial Sequence
  source: /note="Description of Artificial Sequence: Synthetic peptide"
DQTIFGVVPDY

SEQ ID NO: 4181 - DNA, 33 bp, Artificial Sequence
  source: /note="Description of Artificial Sequence: Synthetic oligonucleotide"
gataagacgatttttggagtggtccccgactac

SEQ ID NO: 4182 - protein, 11 aa, Artificial Sequence
  source: /note="Description of Artificial Sequence: Synthetic peptide"
DKTIFGVVPDY

SEQ ID NO: 4183 - DNA, 33 bp, Artificial Sequence; identical to SEQ ID NO: 4181
  source: /note="Description of Artificial Sequence: Synthetic oligonucleotide"

SEQ ID NO: 4184 - protein, 11 aa, Artificial Sequence
  source: /note="Description of Artificial Sequence: Synthetic peptide"
DKTIFGVVPDY

SEQ ID NO: 4185 - DNA, 33 bp, Artificial Sequence; identical to SEQ ID NO: 4181
  source: /note="Description of Artificial Sequence: Synthetic oligonucleotide"

SEQ ID NO: 4186 - protein, 11 aa, Artificial Sequence
  source: /note="Description of Artificial Sequence: Synthetic peptide"
DKTIFGVVPDY

SEQ ID NO: 4187 - DNA, 33 bp, Artificial Sequence
  source: /note="Description of Artificial Sequence: Synthetic oligonucleotide"
gataagtcgatttttggagtggtccccgactac

SEQ ID NO: 4188 - protein, 11 aa, Artificial Sequence
  source: /note="Description of Artificial Sequence: Synthetic peptide"
DKSIFGVVPDY

SEQ ID NO: 4189 - DNA, 33 bp, Artificial Sequence; identical to SEQ ID NO: 4187
  source: /note="Description of Artificial Sequence: Synthetic oligonucleotide"

SEQ ID NO: 4190 - protein, 11 aa, Artificial Sequence
  source: /note="Description of Artificial Sequence: Synthetic peptide"
DKSIFGVVPDY

SEQ ID NO: 4191 - DNA, 33 bp, Artificial Sequence
  source: /note="Description of Artificial Sequence: Synthetic oligonucleotide"
gatctcgcgatttttggagtggtccccgactac

SEQ ID NO: 4192 - protein, 11 aa, Artificial Sequence
  source: /note="Description of Artificial Sequence: Synthetic peptide"
DLAIFGVVPDY

SEQ ID NO: 4193 - DNA, 33 bp, Artificial Sequence; identical to SEQ ID NO: 4191
  source: /note="Description of Artificial Sequence: Synthetic oligonucleotide"

SEQ ID NO: 4194 - protein, 11 aa, Artificial Sequence
  source: /note="Description of Artificial Sequence: Synthetic peptide"
DLAIFGVVPDY

SEQ ID NO: 4195 - protein, 11 aa, Artificial Sequence
  source: /note="Description of Artificial Sequence: Synthetic peptide"
DLAIFGVIPDY

SEQ ID NO: 4196 - protein, 11 aa, Artificial Sequence
  source: /note="Description of Artificial Sequence: Synthetic peptide"
DIAIFGVVPDY

SEQ ID NO: 4197 - protein, 11 aa, Artificial Sequence
  source: /note="Description of Artificial Sequence: Synthetic peptide"
DQAIFGVVPDY

SEQ ID NO: 4198 - protein, 11 aa, Artificial Sequence
  source: /note="Description of Artificial Sequence: Synthetic peptide"
DLAIFGVIPDY

SEQ ID NO: 4199 - protein, 11 aa, Artificial Sequence
  source: /note="Description of Artificial Sequence: Synthetic peptide"
DIAIFGVVPDY

SEQ ID NO: 4200 - protein, 11 aa, Artificial Sequence
  source: /note="Description of Artificial Sequence: Synthetic peptide"
DLAIFGVVPDY

SEQ ID NO: 4201 - protein, 11 aa, Artificial Sequence
  source: /note="Description of Artificial Sequence: Synthetic peptide"
DLAIFGVVPDY

SEQ ID NO: 4202 - protein, 11 aa, Artificial Sequence
  source: /note="Description of Artificial Sequence: Synthetic peptide"
DLAIFGVVPDY

SEQ ID NO: 4203 - DNA, 642 bp, Artificial Sequence
  source: /note="Description of Artificial Sequence: Synthetic polynucleotide"
gaaatagtgatgacgcagtctccagccaccctgtctgtgtctccaggggaaagagccaccctctcctgcagggccagtcagagtgttgatagacacttagcctggtaccagcagaaacctggccaggctcccaggctcctcatctacgaagcagccaccagggccactggtatcccagccaggttcagtggcagtgggtctgggacagagttcactctcaccatcagcagcctgcagtctgaagattttgcagtttattactgtcagcagtatcagaactggcctctcactttcggcggagggaccaaggtggagatcaaacgaacggtggctgcaccatctgtcttcatcttcccgccatctgatgagcagttgaaatctggaactgcctctgttgtgtgcctgctgaataacttctatcccagagaggccaaagtacagtggaaggtggataacgccctccaatcgggtaactcccaggagagtgtcacagagcaggacagcaaggacagcacctacagcctcagcagcaccctgacgctgagcaaagcagactacgagaaacacaaagtctacgcctgcgaagtcacccatcagggcctgagctcgcccgtcacaaagagcttcaacaggggagagtgt

SEQ ID NO: 4204 - protein, 214 aa, Artificial Sequence
  source: /note="Description of Artificial Sequence: Synthetic polypeptide"
EIVMTQSPATLSVSPGERATLSCRASQSVDRHLAWYQQKPGQAPRLLIYEAATRATGIPARFSGSGSGTEFTLTISSLQSEDFAVYYCQQYQNWPLTFGGGTKVEIKRTVAAPSVFIFPPSDEQLKSGTASVVCLLNNFYPREAKVQWKVDNALQSGNSQESVTEQDSKDSTYSLSSTLTLSKADYEKHKVYACEVTHQGLSSPVTKSFNRGEC

SEQ ID NO: 4205 - DNA, 642 bp, Artificial Sequence
  source: /note="Description of Artificial Sequence: Synthetic polynucleotide"
gaaatagtgatgacgcagtctccagccaccctgtctgtgtctccaggggaaagagccaccctctcctgcagggccagtcagagtgttaacagacacttagcctggtaccagcagaaacctggccaggctcccaggctcctcatctacgaagcagccaccagggccactggtatcccagccaggttcagtggcagtgggtctgggacagagttcactctcaccatcagcagcctgcagtctgaagattttgcagtttattactgtcagcagtatcagaactggcctctcactttcggcggagggaccaaggtggagatcaaacgaacggtggctgcaccatctgtcttcatcttcccgccatctgatgagcagttgaaatctggaactgcctctgttgtgtgcctgctgaataacttctatcccagagaggccaaagtacagtggaaggtggataacgccctccaatcgggtaactcccaggagagtgtcacagagcaggacagcaaggacagcacctacagcctcagcagcaccctgacgctgagcaaagcagactacgagaaacacaaagtctacgcctgcgaagtcacccatcagggcctgagctcgcccgtcacaaagagcttcaacaggggagagtgt

SEQ ID NO: 4206 - protein, 214 aa, Artificial Sequence
  source: /note="Description of Artificial Sequence: Synthetic polypeptide"
EIVMTQSPATLSVSPGERATLSCRASQSVNRHLAWYQQKPGQAPRLLIYEAATRATGIPARFSGSGSGTEFTLTISSLQSEDFAVYYCQQYQNWPLTFGGGTKVEIKRTVAAPSVFIFPPSDEQLKSGTASVVCLLNNFYPREAKVQWKVDNALQSGNSQESVTEQDSKDSTYSLSSTLTLSKADYEKHKVYACEVTHQGLSSPVTKSFNRGEC

SEQ ID NO: 4207 - DNA, 642 bp, Artificial Sequence
  source: /note="Description of Artificial Sequence: Synthetic polynucleotide"
gaaatagtgatgacgcagtctccagccaccctgtctgtgtctccaggggaaagagccaccctctcctgcagggccagtcagagtgttcatagacacttagcctggtaccagcagaaacctggccaggctcccaggctcctcatctacgaagcagccaccagggccactggtatcccagccaggttcagtggcagtgggtctgggacagagttcactctcaccatcagcagcctgcagtctgaagattttgcagtttattactgtcagcagtatcagaactggcctctcactttcggcggagggaccaaggtggagatcaaacgaacggtggctgcaccatctgtcttcatcttcccgccatctgatgagcagttgaaatctggaactgcctctgttgtgtgcctgctgaataacttctatcccagagaggccaaagtacagtggaaggtggataacgccctccaatcgggtaactcccaggagagtgtcacagagcaggacagcaaggacagcacctacagcctcagcagcaccctgacgctgagcaaagcagactacgagaaacacaaagtctacgcctgcgaagtcacccatcagggcctgagctcgcccgtcacaaagagcttcaacaggggagagtgt

SEQ ID NO: 4208 - protein, 214 aa, Artificial Sequence
  source: /note="Description of Artificial Sequence: Synthetic polypeptide"
EIVMTQSPATLSVSPGERATLSCRASQSVHRHLAWYQQKPGQAPRLLIYEAATRATGIPARFSGSGSGTEFTLTISSLQSEDFAVYYCQQYQNWPLTFGGGTKVEIKRTVAAPSVFIFPPSDEQLKSGTASVVCLLNNFYPREAKVQWKVDNALQSGNSQESVTEQDSKDSTYSLSSTLTLSKADYEKHKVYACEVTHQGLSSPVTKSFNRGEC

SEQ ID NO: 4209 - DNA, 642 bp, Artificial Sequence
  source: /note="Description of Artificial Sequence: Synthetic polynucleotide"
gaaatagtgatgacgcagtctccagccaccctgtctgtgtctccaggggaaagagccaccctctcctgcagggccagtcagagtgttgaaagacacttagcctggtaccagcagaaacctggccaggctcccaggctcctcatctacgaagcagccaccagggccactggtatcccagccaggttcagtggcagtgggtctgggacagagttcactctcaccatcagcagcctgcagtctgaagattttgcagtttattactgtcagcagtatcagaactggcctctcactttcggcggagggaccaaggtggagatcaaacgaacggtggctgcaccatctgtcttcatcttcccgccatctgatgagcagttgaaatctggaactgcctctgttgtgtgcctgctgaataacttctatcccagagaggccaaagtacagtggaaggtggataacgccctccaatcgggtaactcccaggagagtgtcacagagcaggacagcaaggacagcacctacagcctcagcagcaccctgacgctgagcaaagcagactacgagaaacacaaagtctacgcctgcgaagtcacccatcagggcctgagctcgcccgtcacaaagagcttcaacaggggagagtgt

SEQ ID NO: 4210 - protein, 214 aa, Artificial Sequence
  source: /note="Description of Artificial Sequence: Synthetic polypeptide"
EIVMTQSPATLSVSPGERATLSCRASQSVERHLAWYQQKPGQAPRLLIYEAATRATGIPARFSGSGSGTEFTLTISSLQSEDFAVYYCQQYQNWPLTFGGGTKVEIKRTVAAPSVFIFPPSDEQLKSGTASVVCLLNNFYPREAKVQWKVDNALQSGNSQESVTEQDSKDSTYSLSSTLTLSKADYEKHKVYACEVTHQGLSSPVTKSFNRGEC

SEQ ID NO: 4211 - DNA, 642 bp, Artificial Sequence
  source: /note="Description of Artificial Sequence: Synthetic polynucleotide"
gaaatagtgatgacgcagtctccagccaccctgtctgtgtctccaggggaaagagccaccctctcctgcagggccagtcagagtgttttcagacacttagcctggtaccagcagaaacctggccaggctcccaggctcctcatctacgaagcagccaccagggccactggtatcccagccaggttcagtggcagtgggtctgggacagagttcactctcaccatcagcagcctgcagtctgaagattttgcagtttattactgtcagcagtatcagaactggcctctcactttcggcggagggaccaaggtggagatcaaacgaacggtggctgcaccatctgtcttcatcttcccgccatctgatgagcagttgaaatctggaactgcctctgttgtgtgcctgctgaataacttctatcccagagaggccaaagtacagtggaaggtggataacgccctccaatcgggtaactcccaggagagtgtcacagagcaggacagcaaggacagcacctacagcctcagcagcaccctgacgctgagcaaagcagactacgagaaacacaaagtctacgcctgcgaagtcacccatcagggcctgagctcgcccgtcacaaagagcttcaacaggggagagtgt

SEQ ID NO: 4212 - protein, 214 aa, Artificial Sequence
  source: /note="Description of Artificial Sequence: Synthetic polypeptide"
EIVMTQSPATLSVSPGERATLSCRASQSVFRHLAWYQQKPGQAPRLLIYEAATRATGIPARFSGSGSGTEFTLTISSLQSEDFAVYYCQQYQNWPLTFGGGTKVEIKRTVAAPSVFIFPPSDEQLKSGTASVVCLLNNFYPREAKVQWKVDNALQSGNSQESVTEQDSKDSTYSLSSTLTLSKADYEKHKVYACEVTHQGLSSPVTKSFNRGEC

SEQ ID NO: 4213 - DNA, 642 bp, Artificial Sequence
  source: /note="Description of Artificial Sequence: Synthetic polynucleotide"
gaaatagtgatgacgcagtctccagccaccctgtctgtgtctccaggggaaagagccaccctctcctgcagggccagtcagagtgttaacagacacttagcctggtaccagcagaaacctggccaggctcccaggctcctcatctacgaagcagccaccagggccactggtatcccagccagggtcagtggcagtgggtctgggacagagttcactctcaccatcagcagcctgcagtctgaagattttgcagtttattactgtcagcagtatcagaactggcctctcactttcggcggagggaccaaggtggagatcaaacgaacggtggctgcaccatctgtcttcatcttcccgccatctgatgagcagttgaaatctggaactgcctctgttgtgtgcctgctgaataacttctatcccagagaggccaaagtacagtggaaggtggataacgccctccaatcgggtaactcccaggagagtgtcacagagcaggacagcaaggacagcacctacagcctcagcagcaccctgacgctgagcaaagcagactacgagaaacacaaagtctacgcctgcgaagtcacccatcagggcctgagctcgcccgtcacaaagagcttcaacaggggagagtgt

SEQ ID NO: 4214 - protein, 214 aa, Artificial Sequence
  source: /note="Description of Artificial Sequence: Synthetic polypeptide"
EIVMTQSPATLSVSPGERATLSCRASQSVNRHLAWYQQKPGQAPRLLIYEAATRATGIPARVSGSGSGTEFTLTISSLQSEDFAVYYCQQYQNWPLTFGGGTKVEIKRTVAAPSVFIFPPSDEQLKSGTASVVCLLNNFYPREAKVQWKVDNALQSGNSQESVTEQDSKDSTYSLSSTLTLSKADYEKHKVYACEVTHQGLSSPVTKSFNRGEC

SEQ ID NO: 4215 - DNA, 642 bp, Artificial Sequence
  source: /note="Description of Artificial Sequence: Synthetic polynucleotide"
gaaatagtgatgacgcagtctccagccaccctgtctgtgtctccaggggaaagagccaccctctcctgcagggccagtcagagtgttgaaagacacttagcctggtaccagcagaaacctggccaggctcccaggctcctcatctacgaagcagccaccagggccactggtatcccagccagggtcagtggcagtgggtctgggacagagttcactctcaccatcagcagcctgcagtctgaagattttgcagtttattactgtcagcagtatcagaactggcctctcactttcggcggagggaccaaggtggagatcaaacgaacggtggctgcaccatctgtcttcatcttcccgccatctgatgagcagttgaaatctggaactgcctctgttgtgtgcctgctgaataacttctatcccagagaggccaaagtacagtggaaggtggataacgccctccaatcgggtaactcccaggagagtgtcacagagcaggacagcaaggacagcacctacagcctcagcagcaccctgacgctgagcaaagcagactacgagaaacacaaagtctacgcctgcgaagtcacccatcagggcctgagctcgcccgtcacaaagagcttcaacaggggagagtgt

SEQ ID NO: 4216 - protein, 214 aa, Artificial Sequence
  source: /note="Description of Artificial Sequence: Synthetic polypeptide"
EIVMTQSPATLSVSPGERATLSCRASQSVERHLAWYQQKPGQAPRLLIYEAATRATGIPARVSGSGSGTEFTLTISSLQSEDFAVYYCQQYQNWPLTFGGGTKVEIKRTVAAPSVFIFPPSDEQLKSGTASVVCLLNNFYPREAKVQWKVDNALQSGNSQESVTEQDSKDSTYSLSSTLTLSKADYEKHKVYACEVTHQGLSSPVTKSFNRGEC

SEQ ID NO: 4217 - DNA, 642 bp, Artificial Sequence
  source: /note="Description of Artificial Sequence: Synthetic polynucleotide"
gaaatagtgatgacgcagtctccagccaccctgtctgtgtctccaggggaaagagccaccctctcctgcagggccagtcagagtgttgatagacacttagcctggtaccagcagaaacctggccaggctcccaggctcctcatctacgaagcagccaccagggccactggtatcccagccagggtcagtggcagtgggtctgggacagagttcactctcaccatcagcagcctgcagtctgaagattttgcagtttattactgtcagcagtatcagaactggcctctcactttcggcggagggaccaaggtggagatcaaacgaacggtggctgcaccatctgtcttcatcttcccgccatctgatgagcagttgaaatctggaactgcctctgttgtgtgcctgctgaataacttctatcccagagaggccaaagtacagtggaaggtggataacgccctccaatcgggtaactcccaggagagtgtcacagagcaggacagcaaggacagcacctacagcctcagcagcaccctgacgctgagcaaagcagactacgagaaacacaaagtctacgcctgcgaagtcacccatcagggcctgagctcgcccgtcacaaagagcttcaacaggggagagtgt

SEQ ID NO: 4218 - protein, 214 aa, Artificial Sequence
  source: /note="Description of Artificial Sequence: Synthetic polypeptide"
EIVMTQSPATLSVSPGERATLSCRASQSVDRHLAWYQQKPGQAPRLLIYEAATRATGIPARVSGSGSGTEFTLTISSLQSEDFAVYYCQQYQNWPLTFGGGTKVEIKRTVAAPSVFIFPPSDEQLKSGTASVVCLLNNFYPREAKVQWKVDNALQSGNSQESVTEQDSKDSTYSLSSTLTLSKADYEKHKVYACEVTHQGLSSPVTKSFNRGEC

SEQ ID NO: 4219 - DNA, 642 bp, Artificial Sequence
  source: /note="Description of Artificial Sequence: Synthetic polynucleotide"
gaaatagtgatgacgcagtctccagccaccctgtctgtgtctccaggggaaagagccaccctctcctgcagggccagtcagagtgttctgagtcacttagcctggtaccagcagaaacctggccaggctcccaggctcctcatctacgaagcagccaccagggccactggtatcccagccaggttcagtggcagtgggtctgggacagagttcactctcaccatcagcagcctgcagtctgaagattttgcagtttattactgtcagcagtataacaactggcctctcactttcggcggagggaccaaggtggagatcaaacgaacggtggctgcaccatctgtcttcatcttcccgccatctgatgagcagttgaaatctggaactgcctctgttgtgtgcctgctgaataacttctatcccagagaggccaaagtacagtggaaggtggataacgccctccaatcgggtaactcccaggagagtgtcacagagcaggacagcaaggacagcacctacagcctcagcagcaccctgacgctgagcaaagcagactacgagaaacacaaagtctacgcctgcgaagtcacccatcagggcctgagctcgcccgtcacaaagagcttcaacaggggagagtgt

SEQ ID NO: 4220 - protein, 214 aa, Artificial Sequence
  source: /note="Description of Artificial Sequence: Synthetic polypeptide"
EIVMTQSPATLSVSPGERATLSCRASQSVLSHLAWYQQKPGQAPRLLIYEAATRATGIPARFSGSGSGTEFTLTISSLQSEDFAVYYCQQYNNWPLTFGGGTKVEIKRTVAAPSVFIFPPSDEQLKSGTASVVCLLNNFYPREAKVQWKVDNALQSGNSQESVTEQDSKDSTYSLSSTLTLSKADYEKHKVYACEVTHQGLSSPVTKSFNRGEC

SEQ ID NO: 4221 - DNA, 642 bp, Artificial Sequence
  source: /note="Description of Artificial Sequence: Synthetic polynucleotide"
gaaatagtgatgacgcagtctccagccaccctgtctgtgtctccaggggaaagagccaccctctcctgcagggccagtcagagtgttctgagtcacttagcctggtaccagcagaaacctggccaggctcccaggctcctcatctacgaagcagccaccagggccactggtatcccagccaggttcagtggcagtgggtctgggacagagttcactctcaccatcagcagcctgcagtctgaagattttgcagtttattactgtcagcagtatcagaactggcctctcactttcggcggagggaccaaggtggagatcaaacgaacggtggctgcaccatctgtcttcatcttcccgccatctgatgagcagttgaaatctggaactgcctctgttgtgtgcctgctgaataacttctatcccagagaggccaaagtacagtggaaggtggataacgccctccaatcgggtaactcccaggagagtgtcacagagcaggacagcaaggacagcacctacagcctcagcagcaccctgacgctgagcaaagcagactacgagaaacacaaagtctacgcctgcgaagtcacccatcagggcctgagctcgcccgtcacaaagagcttcaacaggggagagtgt

SEQ ID NO: 4222 - protein, 214 aa, Artificial Sequence
  source: /note="Description of Artificial Sequence: Synthetic polypeptide"
EIVMTQSPATLSVSPGERATLSCRASQSVLSHLAWYQQKPGQAPRLLIYEAATRATGIPARFSGSGSGTEFTLTISSLQSEDFAVYYCQQYQNWPLTFGGGTKVEIKRTVAAPSVFIFPPSDEQLKSGTASVVCLLNNFYPREAKVQWKVDNALQSGNSQESVTEQDSKDSTYSLSSTLTLSKADYEKHKVYACEVTHQGLSSPVTKSFNRGEC

SEQ ID NO: 4223 - DNA, 642 bp, Artificial Sequence
  source: /note="Description of Artificial Sequence: Synthetic polynucleotide"
gaaatagtgatgacgcagtctccagccaccctgtctgtgtctccaggggaaagagccaccctctcctgcagggccagtcagagtgttatgagtcacttagcctggtaccagcagaaacctggccaggctcccaggctcctcatctacgaagcagccaccagggccactggtatcccagccaggttcagtggcagtgggtctgggacagagttcactctcaccatcagcagcctgcagtctgaagattttgcagtttattactgtcagcagtatcagaactggcctctcactttcggcggagggaccaaggtggagatcaaacgaacggtggctgcaccatctgtcttcatcttcccgccatctgatgagcagttgaaatctggaactgcctctgttgtgtgcctgctgaataacttctatcccagagaggccaaagtacagtggaaggtggataacgccctccaatcgggtaactcccaggagagtgtcacagagcaggacagcaaggacagcacctacagcctcagcagcaccctgacgctgagcaaagcagactacgagaaacacaaagtctacgcctgcgaagtcacccatcagggcctgagctcgcccgtcacaaagagcttcaacaggggagagtgt

SEQ ID NO: 4224 - protein, 214 aa, Artificial Sequence
  source: /note="Description of Artificial Sequence: Synthetic polypeptide"
EIVMTQSPATLSVSPGERATLSCRASQSVMSHLAWYQQKPGQAPRLLIYEAATRATGIPARFSGSGSGTEFTLTISSLQSEDFAVYYCQQYQNWPLTFGGGTKVEIKRTVAAPSVFIFPPSDEQLKSGTASVVCLLNNFYPREAKVQWKVDNALQSGNSQESVTEQDSKDSTYSLSSTLTLSKADYEKHKVYACEVTHQGLSSPVTKSFNRGEC

SEQ ID NO: 4225 - DNA, 642 bp, Artificial Sequence
  source: /note="Description of Artificial Sequence: Synthetic polynucleotide"
gaaatagtgatgacgcagtctccagccaccctgtctgtgtctccaggggaaagagccaccctctcctgcagggccagtcagagtgttctgacgcacttagcctggtaccagcagaaacctggccaggctcccaggctcctcatctacgaagcagccaccagggccactggtatcccagccaggttcagtggcagtgggtctgggacagagttcactctcaccatcagcagcctgcagtctgaagattttgcagtttattactgtcagcagtatcagaactggcctctcactttcggcggagggaccaaggtggagatcaaacgaacggtggctgcaccatctgtcttcatcttcccgccatctgatgagcagttgaaatctggaactgcctctgttgtgtgcctgctgaataacttctatcccagagaggccaaagtacagtggaaggtggataacgccctccaatcgggtaactcccaggagagtgtcacagagcaggacagcaaggacagcacctacagcctcagcagcaccctgacgctgagcaaagcagactacgagaaacacaaagtctacgcctgcgaagtcacccatcagggcctgagctcgcccgtcacaaagagcttcaacaggggagagtgt

SEQ ID NO: 4226 - protein, 214 aa, Artificial Sequence
  source: /note="Description of Artificial Sequence: Synthetic polypeptide"
EIVMTQSPATLSVSPGERATLSCRASQSVLTHLAWYQQKPGQAPRLLIYEAATRATGIPARFSGSGSGTEFTLTISSLQSEDFAVYYCQQYQNWPLTFGGGTKVEIKRTVAAPSVFIFPPSDEQLKSGTASVVCLLNNFYPREAKVQWKVDNALQSGNSQESVTEQDSKDSTYSLSSTLTLSKADYEKHKVYACEVTHQGLSSPVTKSFNRGEC

SEQ ID NO: 4227 - DNA, 642 bp, Artificial Sequence
  source: /note="Description of Artificial Sequence: Synthetic polynucleotide"
gaaatagtgatgacgcagtctccagccaccctgtctgtgtctccaggggaaagagccaccctctcctgcagggccagtcagagtgttgatctgcacttagcctggtaccagcagaaacctggccaggctcccaggctcctcatctacgaagcagccaccagggccactggtatcccagccaggttcagtggcagtgggtctgggacagagttcactctcaccatcagcagcctgcagtctgaagattttgcagtttattactgtcagcagtatcagaactggcctctcactttcggcggagggaccaaggtggagatcaaacgaacggtggctgcaccatctgtcttcatcttcccgccatctgatgagcagttgaaatctggaactgcctctgttgtgtgcctgctgaataacttctatcccagagaggccaaagtacagtggaaggtggataacgccctccaatcgggtaactcccaggagagtgtcacagagcaggacagcaaggacagcacctacagcctcagcagcaccctgacgctgagcaaagcagactacgagaaacacaaagtctacgcctgcgaagtcacccatcagggcctgagctcgcccgtcacaaagagcttcaacaggggagagtgt

SEQ ID NO: 4228 - protein, 214 aa, Artificial Sequence
  source: /note="Description of Artificial Sequence: Synthetic polypeptide"
EIVMTQSPATLSVSPGERATLSCRASQSVDLHLAWYQQKPGQAPRLLIYEAATRATGIPARFSGSGSGTEFTLTISSLQSEDFAVYYCQQYQNWPLTFGGGTKVEIKRTVAAPSVFIFPPSDEQLKSGTASVVCLLNNFYPREAKVQWKVDNALQSGNSQESVTEQDSKDSTYSLSSTLTLSKADYEKHKVYACEVTHQGLSSPVTKSFNRGEC

SEQ ID NO: 4229 - DNA, 642 bp, Artificial Sequence
  source: /note="Description of Artificial Sequence: Synthetic polynucleotide"
gaaatagtgatgacgcagtctccagccaccctgtctgtgtctccaggggaaagagccaccctctcctgcagggccagtcagagtgttagcgaacacttagcctggtaccagcagaaacctggccaggctcccaggctcctcatctacgaagcagccaccagggccactggtatcccagccaggttcagtggcagtgggtctgggacagagttcactctcaccatcagcagcctgcagtctgaagattttgcagtttattactgtcagcagtatcagaactggcctctcactttcggcggagggaccaaggtggagatcaaacgaacggtggctgcaccatctgtcttcatcttcccgccatctgatgagcagttgaaatctggaactgcctctgttgtgtgcctgctgaataacttctatcccagagaggccaaagtacagtggaaggtggataacgccctccaatcgggtaactcccaggagagtgtcacagagcaggacagcaaggacagcacctacagcctcagcagcaccctgacgctgagcaaagcagactacgagaaacacaaagtctacgcctgcgaagtcacccatcagggcctgagctcgcccgtcacaaagagcttcaacaggggagagtgt

SEQ ID NO: 4230 - protein, 214 aa, Artificial Sequence
  source: /note="Description of Artificial Sequence: Synthetic polypeptide"
EIVMTQSPATLSVSPGERATLSCRASQSVSEHLAWYQQKPGQAPRLLIYEAATRATGIPARFSGSGSGTEFTLTISSLQSEDFAVYYCQQYQNWPLTFGGGTKVEIKRTVAAPSVFIFPPSDEQLKSGTASVVCLLNNFYPREAKVQWKVDNALQSGNSQESVTEQDSKDSTYSLSSTLTLSKADYEKHKVYACEVTHQGLSSPVTKSFNRGEC

SEQ ID NO: 4231 - DNA, 642 bp, Artificial Sequence; identical to SEQ ID NO: 4229
  source: /note="Description of Artificial Sequence: Synthetic polynucleotide"

SEQ ID NO: 4232 - protein, 214 aa, Artificial Sequence; identical to SEQ ID NO: 4230
  source: /note="Description of Artificial Sequence: Synthetic polypeptide"

SEQ ID NO: 4233 - DNA, 642 bp, Artificial Sequence
  source: /note="Description of Artificial Sequence: Synthetic polynucleotide"
gaaatagtgatgacgcagtctccagccaccctgtctgtgtctccaggggaaagagccaccctctcctgcagggccagtcagagtgttagccggcacttagcctggtaccagcagaaacctggccaggctcccaggctcctcatctacgaagcagccaccagggccactggtatcccagccaggttcagtggcagtgggtctgggacagagttcactctcaccatcagcagcctgcagtctgaagattttgcagtttattactgtcagcagtatcagcactggcctctcactttcggcggagggaccaaggtggagatcaaacgaacggtggctgcaccatctgtcttcatcttcccgccatctgatgagcagttgaaatctggaactgcctctgttgtgtgcctgctgaataacttctatcccagagaggccaaagtacagtggaaggtggataacgccctccaatcgggtaactcccaggagagtgtcacagagcaggacagcaaggacagcacctacagcctcagcagcaccctgacgctgagcaaagcagactacgagaaacacaaagtctacgcctgcgaagtcacccatcagggcctgagctcgcccgtcacaaagagcttcaacaggggagagtgt

SEQ ID NO: 4234 - protein, 214 aa, Artificial Sequence
  source: /note="Description of Artificial Sequence: Synthetic polypeptide"
EIVMTQSPATLSVSPGERATLSCRASQSVSRHLAWYQQKPGQAPRLLIYEAATRATGIPARFSGSGSGTEFTLTISSLQSEDFAVYYCQQYQHWPLTFGGGTKVEIKRTVAAPSVFIFPPSDEQLKSGTASVVCLLNNFYPREAKVQWKVDNALQSGNSQESVTEQDSKDSTYSLSSTLTLSKADYEKHKVYACEVTHQGLSSPVTKSFNRGEC

SEQ ID NO: 4235 - DNA, 642 bp, Artificial Sequence
  source: /note="Description of Artificial Sequence: Synthetic polynucleotide"
gaaatagtgatgacgcagtctccagccaccctgtctgtgtctccaggggaaagagccaccctctcctgcagggccagtcagagtgttttcagccacttagcctggtaccagcagaaacctggccaggctcccaggctcctcatctacgaagcagccaccagggccactggtatcccagccaggttcagtggcagtgggtctgggacagagttcactctcaccatcagcagcctgcagtctgaagattttgcagtttattactgtcagcagtatcagaactggcctctcactttcggcggagggaccaaggtggagatcaaacgaacggtggctgcaccatctgtcttcatcttcccgccatctgatgagcagttgaaatctggaactgcctctgttgtgtgcctgctgaataacttctatcccagagaggccaaagtacagtggaaggtggataacgccctccaatcgggtaactcccaggagagtgtcacagagcaggacagcaaggacagcacctacagcctcagcagcaccctgacgctgagcaaagcagactacgagaaacacaaagtctacgcctgcgaagtcacccatcagggcctgagctcgcccgtcacaaagagcttcaacaggggagagtgt

SEQ ID NO: 4236 - protein, 214 aa, Artificial Sequence
  source: /note="Description of Artificial Sequence: Synthetic polypeptide"
EIVMTQSPATLSVSPGERATLSCRASQSVFSHLAWYQQKPGQAPRLLIYEAATRATGIPARFSGSGSGTEFTLTISSLQSEDFAVYYCQQYQNWPLTFGGGTKVEIKRTVAAPSVFIFPPSDEQLKSGTASVVCLLNNFYPREAKVQWKVDNALQSGNSQESVTEQDSKDSTYSLSSTLTLSKADYEKHKVYACEVTHQGLSSPVTKSFNRGEC

SEQ ID NO: 4237 - DNA, 642 bp, Artificial Sequence
  source: /note="Description of Artificial Sequence: Synthetic polynucleotide"
gaaatagtgatgacgcagtctccagccaccctgtctgtgtctccaggggaaagagccaccctctcctgcagggccagtcagagtgttttcagccacttagcctggtaccagcagaaacctggccaggctcccaggctcctcatctacgaagcagccaccagggccactggtatcccagccagggtcagtggcagtgggtctgggacagagttcactctcaccatcagcagcctgcagtctgaagattttgcagtttattactgtcagcagtatcagaactggcctctcactttcggcggagggaccaaggtggagatcaaacgaacggtggctgcaccatctgtcttcatcttcccgccatctgatgagcagttgaaatctggaactgcctctgttgtgtgcctgctgaataacttctatcccagagaggccaaagtacagtggaaggtggataacgccctccaatcgggtaactcccaggagagtgtcacagagcaggacagcaaggacagcacctacagcctcagcagcaccctgacgctgagcaaagcagactacgagaaacacaaagtctacgcctgcgaagtcacccatcagggcctgagctcgcccgtcacaaagagcttcaacaggggagagtgt

SEQ ID NO: 4238 - protein, 214 aa, Artificial Sequence
  source: /note="Description of Artificial Sequence: Synthetic polypeptide"
EIVMTQSPATLSVSPGERATLSCRASQSVFSHLAWYQQKPGQAPRLLIYEAATRATGIPARVSGSGSGTEFTLTISSLQSEDFAVYYCQQYQNWPLTFGGGTKVEIKRTVAAPSVFIFPPSDEQLKSGTASVVCLLNNFYPREAKVQWKVDNALQSGNSQESVTEQDSKDSTYSLSSTLTLSKADYEKHKVYACEVTHQGLSSPVTKSFNRGEC

SEQ ID NO: 4239 - DNA, 642 bp, Artificial Sequence
  source: /note="Description of Artificial Sequence: Synthetic polynucleotide"
gaaatagtgatgacgcagtctccagccaccctgtctgtgtctccaggggaaagagccaccctctcctgcagggccagtcagagtgttctgagtcacttagcctggtaccagcagaaacctggccaggctcccaggctcctcatctacgaagcagccaccagggccactggtatcccagccaggttcagtggcagtgggtctgggacagagttcactctcaccatcagcagcctgcagtctgaagattttgcagtttattactgtcagcagtatcagcagtggcctctcactttcggcggagggaccaaggtggagatcaaacgaacggtggctgcaccatctgtcttcatcttcccgccatctgatgagcagttgaaatctggaactgcctctgttgtgtgcctgctgaataacttctatcccagagaggccaaagtacagtggaaggtggataacgccctccaatcgggtaactcccaggagagtgtcacagagcaggacagcaaggacagcacctacagcctcagcagcaccctgacgctgagcaaagcagactacgagaaacacaaagtctacgcctgcgaagtcacccatcagggcctgagctcgcccgtcacaaagagcttcaacaggggagagtgt

SEQ ID NO: 4240 - protein, 214 aa, Artificial Sequence
  source: /note="Description of Artificial Sequence: Synthetic polypeptide"
EIVMTQSPATLSVSPGERATLSCRASQSVLSHLAWYQQKPGQAPRLLIYEAATRATGIPARFSGSGSGTEFTLTISSLQSEDFAVYYCQQYQQWPLTFGGGTKVEIKRTVAAPSVFIFPPSDEQLKSGTASVVCLLNNFYPREAKVQWKVDNALQSGNSQESVTEQDSKDSTYSLSSTLTLSKADYEKHKVYACEVTHQGLSSPVTKSFNRGEC

SEQ ID NO: 4241 - DNA, 642 bp, Artificial Sequence
  source: /note="Description of Artificial Sequence: Synthetic polynucleotide"
gaaatagtgatgacgcagtctccagccaccctgtctgtgtctccaggggaaagagccaccctctcctgcagggccagtcagagtgttttcagccacttagcctggtaccagcagaaacctggccaggctcccaggctcctcatctacgaagcagccaccagggccactggtatcccagccaggttcagtggcagtgggtctgggacagagttcactctcaccatcagcagcctgcagtctgaagattttgcagtttattactgtcagcagtatcagcagtggcctctcactttcggcggagggaccaaggtggagatcaaacgaacggtggctgcaccatctgtcttcatcttcccgccatctgatgagcagttgaaatctggaactgcctctgttgtgtgcctgctgaataacttctatcccagagaggccaaagtacagtggaaggtggataacgccctccaatcgggtaactcccaggagagtgtcacagagcaggacagcaaggacagcacctacagcctcagcagcaccctgacgctgagcaaagcagactacgagaaacacaaagtctacgcctgcgaagtcacccatcagggcctgagctcgcccgtcacaaagagcttcaacaggggagagtgt

SEQ ID NO: 4242 - protein, 214 aa, Artificial Sequence
  source: /note="Description of Artificial Sequence: Synthetic polypeptide"
EIVMTQSPATLSVSPGERATLSCRASQSVFSHLAWYQQKPGQAPRLLIYEAATRATGIPARFSGSGSGTEFTLTISSLQSEDFAVYYCQQYQQWPLTFGGGTKVEIKRTVAAPSVFIFPPSDEQLKSGTASVVCLLNNFYPREAKVQWKVDNALQSGNSQESVTEQDSKDSTYSLSSTLTLSKADYEKHKVYACEVTHQGLSSPVTKSFNRGEC

SEQ ID NO: 4243 - DNA, 642 bp, Artificial Sequence
  source: /note="Description of Artificial Sequence: Synthetic polynucleotide"
gaaatagtgatgacgcagtctccagccaccctgtctgtgtctccaggggaaagagccaccctctcctgcagggccagtcagagtgttttcagccacttagcctggtaccagcagaaacctggccaggctcccaggctcctcatctacgaagcagccaccagggccactggtatcccagccagggtcagtggcagtgggtctgggacagagttcactctcaccatcagcagcctgcagtctgaagattttgcagtttattactgtcagcagtatcagcagtggcctctcactttcggcggagggaccaaggtggagatcaaacgaacggtggctgcaccatctgtcttcatcttcccgccatctgatgagcagttgaaatctggaactgcctctgttgtgtgcctgctgaataacttctatcccagagaggccaaagtacagtggaaggtggataacgccctccaatcgggtaactcccaggagagtgtcacagagcaggacagcaaggacagcacctacagcctcagcagcaccctgacgctgagcaaagcagactacgagaaacacaaagtctacgcctgcgaagtcacccatcagggcctgagctcgcccgtcacaaagagcttcaacaggggagagtgt

SEQ ID NO: 4244 - protein, 214 aa, Artificial Sequence
  source: /note="Description of Artificial Sequence: Synthetic polypeptide"
EIVMTQSPATLSVSPGERATLSCRASQSVFSHLAWYQQKPGQAPRLLIYEAATRATGIPARVSGSGSGTEFTLTISSLQSEDFAVYYCQQYQQWPLTFGGGTKVEIKRTVAAPSVFIFPPSDEQLKSGTASVVCLLNNFYPREAKVQWKVDNALQSGNSQESVTEQDSKDSTYSLSSTLTLSKADYEKHKVYACEVTHQGLSSPVTKSFNRGEC

SEQ ID NO: 4245 - DNA, 642 bp, Artificial Sequence
  source: /note="Description of Artificial Sequence: Synthetic polynucleotide"
gaaatagtgatgacgcagtctccagccaccctgtctgtgtctccaggggaaagagccaccctctcctgcagggccagtcagagtgttcagagccacttagcctggtaccagcagaaacctggccaggctcccaggctcctcatctacgaagcagccaccagggccactggtatcccagccaggttcagtggcagtgggtctgggacagagttcactctcaccatcagcagcctgcagtctgaagattttgcagtttattactgtcagcagtatcagaactggcctctcactttcggcggagggaccaaggtggagatcaaacgaacggtggctgcaccatctgtcttcatcttcccgccatctgatgagcagttgaaatctggaactgcctctgttgtgtgcctgctgaataacttctatcccagagaggccaaagtacagtggaaggtggataacgccctccaatcgggtaactcccaggagagtgtcacagagcaggacagcaaggacagcacctacagcctcagcagcaccctgacgctgagcaaagcagactacgagaaacacaaagtctacgcctgcgaagtcacccatcagggcctgagctcgcccgtcacaaagagcttcaacaggggagagtgt

SEQ ID NO: 4246 - protein, 214 aa, Artificial Sequence
  source: /note="Description of Artificial Sequence: Synthetic polypeptide"
EIVMTQSPATLSVSPGERATLSCRASQSVQSHLAWYQQKPGQAPRLLIYEAATRATGIPARFSGSGSGTEFTLTISSLQSEDFAVYYCQQYQNWPLTFGGGTKVEIKRTVAAPSVFIFPPSDEQLKSGTASVVCLLNNFYPREAKVQWKVDNALQSGNSQESVTEQDSKDSTYSLSSTLTLSKADYEKHKVYACEVTHQGLSSPVTKSFNRGEC

SEQ ID NO: 4247 - DNA, 642 bp, Artificial Sequence
  source: /note="Description of Artificial Sequence: Synthetic polynucleotide"
gaaatagtgatgacgcagtctccagccaccctgtctgtgtctccaggggaaagagccaccctctcctgcagggccagtcagagtgttagtagccacttagcctggtaccagcagaaacctggccaggctcccaggctcctcatctacgaagcagccaccagggccactggtatcccagccaggttcagtggcagtgggtctgggacagagttcactctcaccatcagcagcctgcagtctgaagattttgcagtttattactgtcagcagtatcagcagtggcctctcactttcggcggagggaccaaggtggagatcaaacgaacggtggctgcaccatctgtcttcatcttcccgccatctgatgagcagttgaaatctggaactgcctctgttgtgtgcctgctgaataacttctatcccagagaggccaaagtacagtggaaggtggataacgccctccaatcgggtaactcccaggagagtgtcacagagcaggacagcaaggacagcacctacagcctcagcagcaccctgacgctgagcaaagcagactacgagaaacacaaagtctacgcctgcgaagtcacccatcagggcctgagctcgcccgtcacaaagagcttcaacaggggagagtgt

SEQ ID NO: 4248 - protein, 214 aa, Artificial Sequence
  source: /note="Description of Artificial Sequence: Synthetic polypeptide"
EIVMTQSPATLSVSPGERATLSCRASQSVSSHLAWYQQKPGQAPRLLIYEAATRATGIPARFSGSGSGTEFTLTISSLQSEDFAVYYCQQYQQWPLTFGGGTKVEIKRTVAAPSVFIFPPSDEQLKSGTASVVCLLNNFYPREAKVQWKVDNALQSGNSQESVTEQDSKDSTYSLSSTLTLSKADYEKHKVYACEVTHQGLSSPVTKSFNRGEC

SEQ ID NO: 4249 - DNA, 642 bp, Artificial Sequence
  source: /note="Description of Artificial Sequence: Synthetic polynucleotide"
gaaatagtgatgacgcagtctccagccaccctgtctgtgtctccaggggaaagagccaccctctcctgcagggccagtcagagtgttttcacgcacttagcctggtaccagcagaaacctggccaggctcccaggctcctcatctacgaagcagccaccagggccactggtatcccagccaggttcagtggcagtgggtctgggacagagttcactctcaccatcagcagcctgcagtctgaagattttgcagtttattactgtcagcagtataacaactggcctctcactttcggcggagggaccaaggtggagatcaaacgaacggtggctgcaccatctgtcttcatcttcccgccatctgatgagcagttgaaatctggaactgcctctgttgtgtgcctgctgaataacttctatcccagagaggccaaagtacagtggaaggtggataacgccctccaatcgggtaactcccaggagagtgtcacagagcaggacagcaaggacagcacctacagcctcagcagcaccctgacgctgagcaaagcagactacgagaaacacaaagtctacgcctgcgaagtcacccatcagggcctgagctcgcccgtcacaaagagcttcaacaggggagagtgt

SEQ ID NO: 4250 - protein, 214 aa, Artificial Sequence
  source: /note="Description of Artificial Sequence: Synthetic polypeptide"
EIVMTQSPATLSVSPGERATLSCRASQSVFTHLAWYQQKPGQAPRLLIYEAATRATGIPARFSGSGSGTEFTLTISSLQSEDFAVYYCQQYNNWPLTFGGGTKVEIKRTVAAPSVFIFPPSDEQLKSGTASVVCLLNNFYPREAKVQWKVDNALQSGNSQESVTEQDSKDSTYSLSSTLTLSKADYEKHKVYACEVTHQGLSSPVTKSFNRGEC

SEQ ID NO: 4251 - DNA, 642 bp, Artificial Sequence
  source: /note="Description of Artificial Sequence: Synthetic polynucleotide"
gaaatagtgatgacgcagtctccagccaccctgtctgtgtctccaggggaaagagccaccctctcctgcagggccagtcagagtgttttcacgcacttagcctggtaccagcagaaacctggccaggctcccaggctcctcatctacgaagcagccaccagggccactggtatcccagccagggtcagtggcagtgggtctgggacagagttcactctcaccatcagcagcctgcagtctgaagattttgcagtttattactgtcagcagtataacaactggcctctcactttcggcggagggaccaaggtggagatcaaacgaacggtggctgcaccatctgtcttcatcttcccgccatctgatgagcagttgaaatctggaactgcctctgttgtgtgcctgctgaataacttctatcccagagaggccaaagtacagtggaaggtggataacgccctccaatcgggtaactcccaggagagtgtcacagagcaggacagcaaggacagcacctacagcctcagcagcaccctgacgctgagcaaagcagactacgagaaacacaaagtctacgcctgcgaagtcacccatcagggcctgagctcgcccgtcacaaagagcttcaacaggggagagtgt

SEQ ID NO: 4252 - protein, 214 aa, Artificial Sequence
  source: /note="Description of Artificial Sequence: Synthetic polypeptide"
EIVMTQSPATLSVSPGERATLSCRASQSVFTHLAWYQQKPGQAPRLLIYEAATRATGIPARVSGSGSGTEFTLTISSLQSEDFAVYYCQQYNNWPLTFGGGTKVEIKRTVAAPSVFIFPPSDEQLKSGTASVVCLLNNFYPREAKVQWKVDNALQSGNSQESVTEQDSKDSTYSLSSTLTLSKADYEKHKVYACEVTHQGLSSPVTKSFNRGEC

SEQ ID NO: 4253 - DNA, 642 bp, Artificial Sequence
  source: /note="Description of Artificial Sequence: Synthetic polynucleotide"
gaaatagtgatgacgcagtctccagccaccctgtctgtgtctccaggggaaagagccaccctctcctgcagggccagtcagagtgtttttgaacacttagcctggtaccagcagaaacctggccaggctcccaggctcctcatctacgaagcagccaccagggccactggtatcccagccaggttcagtggcagtgggtctgggacagagttcactctcaccatcagcagcctgcagtctgaagattttgcagtttattactgtcagcagtataacaactggcctctcactttcggcggagggaccaaggtggagatcaaacgaacggtggctgcaccatctgtcttcatcttcccgccatctgatgagcagttgaaatctggaactgcctctgttgtgtgcctgctgaataacttctatcccagagaggccaaagtacagtggaaggtggataacgccctccaatcgggtaactcccaggagagtgtcacagagcaggacagcaaggacagcacctacagcctcagcagcaccctgacgctgagcaaagcagactacgagaaacacaaagtctacgcctgcgaagtcacccatcagggcctgagctcgcccgtcacaaagagcttcaacaggggagagtgt

SEQ ID NO: 4254 - protein, 214 aa, Artificial Sequence
  source: /note="Description of Artificial Sequence: Synthetic polypeptide"
EIVMTQSPATLSVSPGERATLSCRASQSVFEHLAWYQQKPGQAPRLLIYEAATRATGIPARFSGSGSGTEFTLTISSLQSEDFAVYYCQQYNNWPLTFGGGTKVEIKRTVAAPSVFIFPPSDEQLKSGTASVVCLLNNFYPREAKVQWKVDNALQSGNSQESVTEQDSKDSTYSLSSTLTLSKADYEKHKVYACEVTHQGLSSPVTKSFNRGEC

SEQ ID NO: 4255 - DNA, 642 bp, Artificial Sequence
  source: /note="Description of Artificial Sequence: Synthetic polynucleotide"
gaaatagtgatgacgcagtctccagccaccctgtctgtgtctccaggggaaagagccaccctctcctgcagggccagtcagagtgttgaacagcacttagcctggtaccagcagaaacctggccaggctcccaggctcctcatctacgaagcagccaccagggccactggtatcccagccaggttcagtggcagtgggtctgggacagagttcactctcaccatcagcagcctgcagtctgaagattttgcagtttattactgtcagcagtataacaactggcctctcactttcggcggagggaccaaggtggagatcaaacgaacggtggctgcaccatctgtcttcatcttcccgccatctgatgagcagttgaaatctggaactgcctctgttgtgtgcctgctgaataacttctatcccagagaggccaaagtacagtggaaggtggataacgccctccaatcgggtaactcccaggagagtgtcacagagcaggacagcaaggacagcacctacagcctcagcagcaccctgacgctgagcaaagcagactacgagaaacacaaagtctacgcctgcgaagtcacccatcagggcctgagctcgcccgtcacaaagagcttcaacaggggagagtgt

SEQ ID NO: 4256 - protein, 214 aa, Artificial Sequence
  source: /note="Description of Artificial Sequence: Synthetic polypeptide"
EIVMTQSPATLSVSPGERATLSCRASQSVEQHLAWYQQKPGQAPRLLIYEAATRATGIPARFSGSGSGTEFTLTISSLQSEDFAVYYCQQYNNWPLTFGGGTKVEIKRTVAAPSVFIFPPSDEQLKSGTASVVCLLNNFYPREAKVQWKVDNALQSGNSQESVTEQDSKDSTYSLSSTLTLSKADYEKHKVYACEVTHQGLSSPVTKSFNRGEC

SEQ ID NO: 4257 - DNA, 642 bp, Artificial Sequence
  source: /note="Description of Artificial Sequence: Synthetic polynucleotide"
gaaatagtgatgacgcagtctccggccaccctgtctgtgtctccaggggaaagagccaccctctcctgcagggccagtcagagtgttcatagccacttagcctggtaccagcagaaacctggccaggctcccaggctcctcatctacgaagcagccaccagggccactggtatcccagccaggttcagtggcagtgggtctgggacagagttcactctcaccatcagcagcctgcagtctgaagattttgcagtttattactgtcagcagtataaccagtggcctctcactttcggcggagggaccaaggtggagatcaaacgaacggtggctgcaccatctgtcttcatcttcccgccatctgatgagcagttgaaatctggaactgcctctgttgtgtgcctgctgaataacttctatcccagagaggccaaagtacagtggaaggtggataacgccctccaatcgggtaactcccaggagagtgtcacagagcaggacagcaaggacagcacctacagcctcagcagcaccctgacgctgagcaaagcagactacgagaaacacaaagtctacgcctgcgaagtcacccatcagggcctgagctcgcccgtcacaaagagcttcaacaggggagagtgt

SEQ ID NO: 4258 - protein, 214 aa, Artificial Sequence
  source: /note="Description of Artificial Sequence: Synthetic polypeptide"
EIVMTQSPATLSVSPGERATLSCRASQSVHSHLAWYQQKPGQAPRLLIYEAATRATGIPARFSGSGSGTEFTLTISSLQSEDFAVYYCQQYNQWPLTFGGGTKVEIKRTVAAPSVFIFPPSDEQLKSGTASVVCLLNNFYPREAKVQWKVDNALQSGNSQESVTEQDSKDSTYSLSSTLTLSKADYEKHKVYACEVTHQGLSSPVTKSFNRGEC

SEQ ID NO: 4259 - DNA, 642 bp, Artificial Sequence
  source: /note="Description of Artificial Sequence: Synthetic polynucleotide"
gaaatagtgatgacgcagtctccagccaccctgtctgtgtctccaggggaaagagccaccctctcctgcagggccagtcagagtgttcatcatcacttagcctggtaccagcagaaacctggccaggctcccaggctcctcatctacgaagcagccaccagggccactggtatcccagccaggttcagtggcagtgggtctgggacagagttcactctcaccatcagcagcctgcagtctgaagattttgcagtttattactgtcagcagtataaccagtggcctctcactttcggcggagggaccaaggtggagatcaaacgaacggtggctgcaccatctgtcttcatcttcccgccatctgatgagcagttgaaatctggaactgcctctgttgtgtgcctgctgaataacttctatcccagagaggccaaagtacagtggaaggtggataacgccctccaatcgggtaactcccaggagagtgtcacagagcaggacagcaaggacagcacctacagcctcagcagcaccctgacgctgagcaaagcagactacgagaaacacaaagtctacgcctgcgaagtcacccatcagggcctgagctcgcccgtcacaaagagcttcaacaggggagagtgt

SEQ ID NO: 4260 - protein, 214 aa, Artificial Sequence
  source: /note="Description of Artificial Sequence: Synthetic polypeptide"
EIVMTQSPATLSVSPGERATLSCRASQSVHHHLAWYQQKPGQAPRLLIYEAATRATGIPARFSGSGSGTEFTLTISSLQSEDFAVYYCQQYNQWPLTFGGGTKVEIKRTVAAPSVFIFPPSDEQLKSGTASVVCLLNNFYPREAKVQWKVDNALQSGNSQESVTEQDSKDSTYSLSSTLTLSKADYEKHKVYACEVTHQGLSSPVTKSFNRGEC

SEQ ID NO: 4261 - DNA, 642 bp, Artificial Sequence
  source: /note="Description of Artificial Sequence: Synthetic polynucleotide"
gaaatagtgatgacgcagtctccagccaccctgtctgtgtctccaggggaaagagccaccctctcctgcagggccagtcagagtgttcatagccacttagcctggtaccagcagaaacctggccaggctcccaggctcctcatctacgaagcagccaccagggccactggtatcccagccaggttcagtggcagtgggtctgggacagagttcactctcaccatcagcagcctgcagtctgaagattttgcagtttattactgtcagcagtataacaactggcctctcactttcggcggagggaccaaggtggagatcaaacgaacggtggctgcaccatctgtcttcatcttcccgccatctgatgagcagttgaaatctggaactgcctctgttgtgtgcctgctgaataacttctatcccagagaggccaaagtacagtggaaggtggataacgccctccaatcgggtaactcccaggagagtgtcacagagcaggacagcaaggacagcacctacagcctcagcagcaccctgacgctgagcaaagcagactacgagaaacacaaagtctacgcctgcgaagtcacccatcagggcctgagctcgcccgtcacaaagagcttcaacaggggagagtgt

SEQ ID NO: 4262 - protein, 214 aa, Artificial Sequence
  source: /note="Description of Artificial Sequence: Synthetic polypeptide"
EIVMTQSPATLSVSPGERATLSCRASQSVHSHLAWYQQKPGQAPRLLIYEAATRATGIPARFSGSGSGTEFTLTISSLQSEDFAVYYCQQYNNWPLTFGGGTKVEIKRTVAAPSVFIFPPSDEQLKSGTASVVCLLNNFYPREAKVQWKVDNALQSGNSQESVTEQDSKDSTYSLSSTLTLSKADYEKHKVYACEVTHQGLSSPVTKSFNRGEC

SEQ ID NO: 4263 - DNA, 642 bp, Artificial Sequence
  source: /note="Description of Artificial Sequence: Synthetic polynucleotide"
gaaatagtgatgacgcagtctccagccaccctgtctgtgtctccaggggaaagagccaccctctcctgcagggccagtcagagtgttgatgtcaacttagcctggtaccagcagaaacctggccaggctcccaggctcctcatctacgaagcagccaccagggccactggtatcccagccaggttcagtggcagtgggtctgggacagagttcactctcaccatcagcagcctgcagtctgaagattttgcagtttattactgtcagcagtataaccagtggcctctcactttcggcggagggaccaaggtggagatcaaacgaacggtggctgcaccatctgtcttcatcttcccgccatctgatgagcagttgaaatctggaactgcctctgttgtgtgcctgctgaataacttctatcccagagaggccaaagtacagtggaaggtggataacgccctccaatcgggtaactcccaggagagtgtcacagagcaggacagcaaggacagcacctacagcctcagcagcaccctgacgctgagcaaagcagactacgagaaacacaaagtctacgcctgcgaagtcacccatcagggcctgagctcgcccgtcacaaagagcttcaacaggggagagtgt

SEQ ID NO: 4264 - protein, 214 aa, Artificial Sequence
  source: /note="Description of Artificial Sequence: Synthetic polypeptide"
EIVMTQSPATLSVSPGERATLSCRASQSVDVNLAWYQQKPGQAPRLLIYEAATRATGIPARFSGSGSGTEFTLTISSLQSEDFAVYYCQQYNQWPLTFGGGTKVEIKRTVAAPSVFIFPPSDEQLKSGTASVVCLLNNFYPREAKVQWKVDNALQSGNSQESVTEQDSKDSTYSLSSTLTLSKADYEKHKVYACEVTHQGLSSPVTKSFNRGEC

SEQ ID NO: 4265 - DNA, 642 bp, Artificial Sequence
  source: /note="Description of Artificial Sequence: Synthetic polynucleotide"
gaaatagtgatgacgcagtctccagccaccctgtctgtgtctccaggggaaagagccaccctctcctgcagggccagtcagagtgttgatgtccacttagcctggtaccagcagaaacctggccaggctcccaggctcctcatctacgaagcagccaccagggccactggtatcccagccaggttcagtggcagtgggtctgggacagagttcactctcaccatcagcagcctgcagtctgaagattttgcagtttattactgtcagcagtataaccagtggcctctcactttcggcggagggaccaaggtggagatcaaacgaacggtggctgcaccatctgtcttcatcttcccgccatctgatgagcagttgaaatctggaactgcctctgttgtgtgcctgctgaataacttctatcccagagaggccaaagtacagtggaaggtggataacgccctccaatcgggtaactcccaggagagtgtcacagagcaggacagcaaggacagcacctacagcctcagcagcaccctgacgctgagcaaagcagactacgagaaacacaaagtctacgcctgcgaagtcacccatcagggcctgagctcgcccgtcacaaagagcttcaacaggggagagtgt

SEQ ID NO: 4266 - protein, 214 aa, Artificial Sequence
  source: /note="Description of Artificial Sequence: Synthetic polypeptide"
EIVMTQSPATLSVSPGERATLSCRASQSVDVHLAWYQQKPGQAPRLLIYEAATRATGIPARFSGSGSGTEFTLTISSLQSEDFAVYYCQQYNQWPLTFGGGTKVEIKRTVAAPSVFIFPPSDEQLKSGTASVVCLLNNFYPREAKVQWKVDNALQSGNSQESVTEQDSKDSTYSLSSTLTLSKADYEKHKVYACEVTHQGLSSPVTKSFNRGEC

SEQ ID NO: 4267 - DNA, 642 bp, Artificial Sequence; identical to SEQ ID NO: 4253
  source: /note="Description of Artificial Sequence: Synthetic polynucleotide"

SEQ ID NO: 4268 - protein, 214 aa, Artificial Sequence; identical to SEQ ID NO: 4254
  source: /note="Description of Artificial Sequence: Synthetic polypeptide"

SEQ ID NO: 4269 - DNA, 642 bp, Artificial Sequence
  source: /note="Description of Artificial Sequence: Synthetic polynucleotide"
gaaatagtgatgacgcagtctccagccaccctgtctgtgtctccaggggaaagagccaccctctcctgcagggccagtcagagtgtttttgaacacttagcctggtaccagcagaaacctggccaggctcccaggctcctcatctacgaagcagccaccagggccactggtatcccagccagggtcagtggcagtgggtctgggacagagttcactctcaccatcagcagcctgcagtctgaagattttgcagtttattactgtcagcagtataacaactggcctctcactttcggcggagggaccaaggtggagatcaaacgaacggtggctgcaccatctgtcttcatcttcccgccatctgatgagcagttgaaatctggaactgcctctgttgtgtgcctgctgaataacttctatcccagagaggccaaagtacagtggaaggtggataacgccctccaatcgggtaactcccaggagagtgtcacagagcaggacagcaaggacagcacctacagcctcagcagcaccctgacgctgagcaaagcagactacgagaaacacaaagtctacgcctgcgaagtcacccatcagggcctgagctcgcccgtcacaaagagcttcaacaggggagagtgt

SEQ ID NO: 4270 - protein, 214 aa, Artificial Sequence
  source: /note="Description of Artificial Sequence: Synthetic polypeptide"
EIVMTQSPATLSVSPGERATLSCRASQSVFEHLAWYQQKPGQAPRLLIYEAATRATGIPARVSGSGSGTEFTLTISSLQSEDFAVYYCQQYNNWPLTFGGGTKVEIKRTVAAPSVFIFPPSDEQLKSGTASVVCLLNNFYPREAKVQWKVDNALQSGNSQESVTEQDSKDSTYSLSSTLTLSKADYEKHKVYACEVTHQGLSSPVTKSFNRGEC

SEQ ID NO: 4271 - DNA, 642 bp, Artificial Sequence
  source: /note="Description of Artificial Sequence: Synthetic polynucleotide"
gaaatagtgatgacgcagtctccagccaccctgtctgtgtctccaggggaaagagccaccctctcctgcagggccagtcagagtgttttcgaacacttagcctggtaccagcagaaacctggccaggctcccaggctcctcatctacgaagcagccaccagggccactggtatcccagccaggttcagtggcagtgggtctgggacagagttcactctcaccatcagcagcctgcagtctgaagattttgcagtttattactgtcagcagtataaccagtggcctctcactttcggcggagggaccaaggtggagatcaaacgaacggtggctgcaccatctgtcttcatcttcccgccatctgatgagcagttgaaatctggaactgcctctgttgtgtgcctgctgaataacttctatcccagagaggccaaagtacagtggaaggtggataacgccctccaatcgggtaactcccaggagagtgtcacagagcaggacagcaaggacagcacctacagcctcagcagcaccctgacgctgagcaaagcagactacgagaaacacaaagtctacgcctgcgaagtcacccatcagggcctgagctcgcccgtcacaaagagcttcaacaggggagagtgt

SEQ ID NO: 4272 - protein, 214 aa, Artificial Sequence
  source: /note="Description of Artificial Sequence: Synthetic polypeptide"
EIVMTQSPATLSVSPGERATLSCRASQSVFEHLAWYQQKPGQAPRLLIYEAATRATGIPARFSGSGSGTEFTLTISSLQSEDFAVYYCQQYNQWPLTFGGGTKVEIKRTVAAPSVFIFPPSDEQLKSGTASVVCLLNNFYPREAKVQWKVDNALQSGNSQESVTEQDSKDSTYSLSSTLTLSKADYEKHKVYACEVTHQGLSSPVTKSFNRGEC

SEQ ID NO: 4273 - DNA, 642 bp, Artificial Sequence
  source: /note="Description of Artificial Sequence: Synthetic polynucleotide"
gaaatagtgatgacgcagtctccagccaccctgtctgtgtctccaggggaaagagccaccctctcctgcagggccagtcagagtgttctggaacacttagcctggtaccagcagaaacctggccaggctcccaggctcctcatctacgaagcagccaccagggccactggtatcccagccaggttcagtggcagtgggtctgggacagagttcactctcaccatcagcagcctgcagtctgaagattttgcagtttattactgtcagcagtataacaactggcctctcactttcggcggagggaccaaggtggagatcaaacgaacggtggctgcaccatctgtcttcatcttcccgccatctgatgagcagttgaaatctggaactgcctctgttgtgtgcctgctgaataacttctatcccagagaggccaaagtacagtggaaggtggataacgccctccaatcgggtaactcccaggagagtgtcacagagcaggacagcaaggacagcacctacagcctcagcagcaccctgacgctgagcaaagcagactacgagaaacacaaagtctacgcctgcgaagtcacccatcagggcctgagctcgcccgtcacaaagagcttcaacaggggagagtgt

SEQ ID NO: 4274 - protein, 214 aa, Artificial Sequence
  source: /note="Description of Artificial Sequence: Synthetic polypeptide"
EIVMTQSPATLSVSPGERATLSCRASQSVLEHLAWYQQKPGQAPRLLIYEAATRATGIPARFSGSGSGTEFTLTISSLQSEDFAVYYCQQYNNWPLTFGGGTKVEIKRTVAAPSVFIFPPSDEQLKSGTASVVCLLNNFYPREAKVQWKVDNALQSGNSQESVTEQDSKDSTYSLSSTLTLSKADYEKHKVYACEVTHQGLSSPVTKSFNRGEC

SEQ ID NO: 4275 - DNA, 642 bp, Artificial Sequence
  source: /note="Description of Artificial Sequence: Synthetic polynucleotide"
gaaatagtgatgacgcagtctccagccaccctgtctgtgtctccaggggaaagagccaccctctcctgcagggccagtcagagtgttgatagacacttagcctggtaccagcagaaacctggccaggctcccaggctcctcatctacgaagcagccaccagggccactggtatcccagccaggttcagtggcagtgggtctgggacagagttcactctcaccatcagcagcctgcagtctgaagattttgcagtttattactgtcagcagtataaccagtggcctctcactttcggcggagggaccaaggtggagatcaaacgaacggtggctgcaccatctgtcttcatcttcccgccatctgatgagcagttgaaatctggaactgcctctgttgtgtgcctgctgaataacttctatcccagagaggccaaagtacagtggaaggtggataacgccctccaatcgggtaactcccaggagagtgtcacagagcaggacagcaaggacagcacctacagcctcagcagcaccctgacgctgagcaaagcagactacgagaaacacaaagtctacgcctgcgaagtcacccatcagggcctgagctcgcccgtcacaaagagcttcaacaggggagagtgt

SEQ ID NO: 4276 - protein, 214 aa, Artificial Sequence
  source: /note="Description of Artificial Sequence: Synthetic polypeptide"
EIVMTQSPATLSVSPGERATLSCRASQSVDRHLAWYQQKPGQAPRLLIYEAATRATGIPARFSGSGSGTEFTLTISSLQSEDFAVYYCQQYNQWPLTFGGGTKVEIKRTVAAPSVFIFPPSDEQLKSGTASVVCLLNNFYPREAKVQWKVDNALQSGNSQESVTEQDSKDSTYSLSSTLTLSKADYEKHKVYACEVTHQGLSSPVTKSFNRGEC

SEQ ID NO: 4277 - DNA, 642 bp, Artificial Sequence
  source: /note="Description of Artificial Sequence: Synthetic polynucleotide"
gaaatagtgatgacgcagtctccagccaccctgtctgtgtctccaggggaaagagccaccctctcctgcagggccagtcagagtgttaaccggcacttagcctggtaccagcagaaacctggccaggctcccaggctcctcatctacgaagcagccaccagggccactggtatcccagccaggttcagtggcagtgggtctgggacagagttcactctcaccatcagcagcctgcagtctgaagattttgcagtttattactgtcagcagtatcagcagtggcctctcactttcggcggagggaccaaggtggagatcaaacgaacggtggctgcaccatctgtcttcatcttcccgccatctgatgagcagttgaaatctggaactgcctctgttgtgtgcctgctgaataacttctatcccagagaggccaaagtacagtggaaggtggataacgccctccaatcgggtaactcccaggagagtgtcacagagcaggacagcaaggacagcacctacagcctcagcagcaccctgacgctgagcaaagcagactacgagaaacacaaagtctacgcctgcgaagtcacccatcagggcctgagctcgcccgtcacaaagagcttcaacaggggagagtgt

SEQ ID NO: 4278 - protein, 214 aa, Artificial Sequence
  source: /note="Description of Artificial Sequence: Synthetic polypeptide"
EIVMTQSPATLSVSPGERATLSCRASQSVNRHLAWYQQKPGQAPRLLIYEAATRATGIPARFSGSGSGTEFTLTISSLQSEDFAVYYCQQYQQWPLTFGGGTKVEIKRTVAAPSVFIFPPSDEQLKSGTASVVCLLNNFYPREAKVQWKVDNALQSGNSQESVTEQDSKDSTYSLSSTLTLSKADYEKHKVYACEVTHQGLSSPVTKSFNRGEC

SEQ ID NO: 4279 - DNA, 642 bp, Artificial Sequence
  source: /note="Description of Artificial Sequence: Synthetic polynucleotide"
gaaatagtgatgacgcagtctccagccaccctgtctgtgtctccaggggaaagagccaccctctcctgcagggccagtcagagtgttaacgtacacttagcctggtaccagcagaaacctggccaggctcccaggctcctcatctaccaggcagccaccagggccactggtatcccagccaggttcagtggcagtgggtctgggacagagttcactctcaccatcagcagcctgcagtctgaagattttgcagtttattactgtcagcagtataaccagtggcctctcactttcggcggagggaccaaggtggagatcaaacgaacggtggctgcaccatctgtcttcatcttcccgccatctgatgagcagttgaaatctggaactgcctctgttgtgtgcctgctgaataacttctatcccagagaggccaaagtacagtggaaggtggataacgccctccaatcgggtaactcccaggagagtgtcacagagcaggacagcaaggacagcacctacagcctcagcagcaccctgacgctgagcaaagcagactacgagaaacacaaagtctacgcctgcgaagtcacccatcagggcctgagctcgcccgtcacaaagagcttcaacaggggagagtgt

SEQ ID NO: 4280 - protein, 214 aa, Artificial Sequence
  source: /note="Description of Artificial Sequence: Synthetic polypeptide"
EIVMTQSPATLSVSPGERATLSCRASQSVNVHLAWYQQKPGQAPRLLIYQAATRATGIPARFSGSGSGTEFTLTISSLQSEDFAVYYCQQYNQWPLTFGGGTKVEIKRTVAAPSVFIFPPSDEQLKSGTASVVCLLNNFYPREAKVQWKVDNALQSGNSQESVTEQDSKDSTYSLSSTLTLSKADYEKHKVYACEVTHQGLSSPVTKSFNRGEC

SEQ ID NO: 4281 - DNA, 642 bp, Artificial Sequence; identical to SEQ ID NO: 4225
  source: /note="Description of Artificial Sequence: Synthetic polynucleotide"

SEQ ID NO: 4282 - protein, 214 aa, Artificial Sequence; identical to SEQ ID NO: 4226
  source: /note="Description of Artificial Sequence: Synthetic polypeptide"

SEQ ID NO: 4283 - DNA, 642 bp, Artificial Sequence
  source: /note="Description of Artificial Sequence: Synthetic polynucleotide"
gaaatagtgatgacgcagtctccagccaccctgtctgtgtctccaggggaaagagccaccctctcctgcagggccagtcagagtgttctgacgcacttagcctggtaccagcagaaacctggccaggctcccaggctcctcatctacgaagcagccaccagggccactggtatcccagccagggtcagtggcagtgggtctgggacagagttcactctcaccatcagcagcctgcagtctgaagattttgcagtttattactgtcagcagtatcagaactggcctctcactttcggcggagggaccaaggtggagatcaaacgaacggtggctgcaccatctgtcttcatcttcccgccatctgatgagcagttgaaatctggaactgcctctgttgtgtgcctgctgaataacttctatcccagagaggccaaagtacagtggaaggtggataacgccctccaatcgggtaactcccaggagagtgtcacagagcaggacagcaaggacagcacctacagcctcagcagcaccctgacgctgagcaaagcagactacgagaaacacaaagtctacgcctgcgaagtcacccatcagggcctgagctcgcccgtcacaaagagcttcaacaggggagagtgt

SEQ ID NO: 4284 - protein, 214 aa, Artificial Sequence
  source: /note="Description of Artificial Sequence: Synthetic polypeptide"
EIVMTQSPATLSVSPGERATLSCRASQSVLTHLAWYQQKPGQAPRLLIYEAATRATGIPARVSGSGSGTEFTLTISSLQSEDFAVYYCQQYQNWPLTFGGGTKVEIKRTVAAPSVFIFPPSDEQLKSGTASVVCLLNNFYPREAKVQWKVDNALQSGNSQESVTEQDSKDSTYSLSSTLTLSKADYEKHKVYACEVTHQGLSSPVTKSFNRGEC

SEQ ID NO: 4285 - DNA, 642 bp, Artificial Sequence; identical to SEQ ID NO: 1955
  source: /note="Description of Artificial Sequence: Synthetic polynucleotide"

SEQ ID NO: 4286 - protein, 214 aa, Artificial Sequence; identical to SEQ ID NO: 385
  source: /note="Description of Artificial Sequence: Synthetic polypeptide"

SEQ ID NO: 4287 - DNA, 642 bp, Artificial Sequence; identical to SEQ ID NO: 1955
  source: /note="Description of Artificial Sequence: Synthetic polynucleotide"

SEQ ID NO: 4288 - protein, 214 aa, Artificial Sequence; identical to SEQ ID NO: 385
  source: /note="Description of Artificial Sequence: Synthetic polypeptide"

SEQ ID NO: 4289 - DNA, 642 bp, Artificial Sequence; identical to SEQ ID NO: 1955
  source: /note="Description of Artificial Sequence: Synthetic polynucleotide"

SEQ ID NO: 4290 - protein, 214 aa, Artificial Sequence; identical to SEQ ID NO: 385
  source: /note="Description of Artificial Sequence: Synthetic polypeptide"

SEQ ID NO: 4291 - DNA, 642 bp, Artificial Sequence; identical to SEQ ID NO: 1894
  source: /note="Description of Artificial Sequence: Synthetic polynucleotide"

SEQ ID NO: 4292 - protein, 214 aa, Artificial Sequence; identical to SEQ ID NO: 324
  source: /note="Description of Artificial Sequence: Synthetic polypeptide"

SEQ ID NO: 4293 - DNA, 642 bp, Artificial Sequence
  source: /note="Description of Artificial Sequence: Synthetic polynucleotide"
gaaatagtgatgacgcagtctccagccaccctgtctgtgtctccaggggaaagagccaccctctcctgcagggccagtcagagtgttagcagcaacttagcctggtaccagcagaaacctggccaggctcccaggctcctcatctatgaagcagccaccagggccactggtatcccagccagggtcagtggcagtgggtctgggacagagttcactctcaccatcagcagcctgcagtctgaagattttgcagtttattactgtcagcagtataataactggcctctcactttcggcggagggaccaaggtggagatcaaacgaacggtggctgcaccatctgtcttcatcttcccgccatctgatgagcagttgaaatctggaactgcctctgttgtgtgcctgctgaataacttctatcccagagaggccaaagtacagtggaaggtggataacgccctccaatcgggtaactcccaggagagtgtcacagagcaggacagcaaggacagcacctacagcctcagcagcaccctgacgctgagcaaagcagactacgagaaacacaaagtctacgcctgcgaagtcacccatcagggcctgagctcgcccgtcacaaagagcttcaacaggggagagtgt

SEQ ID NO: 4294 - protein, 214 aa, Artificial Sequence
  source: /note="Description of Artificial Sequence: Synthetic polypeptide"
EIVMTQSPATLSVSPGERATLSCRASQSVSSNLAWYQQKPGQAPRLLIYEAATRATGIPARVSGSGSGTEFTLTISSLQSEDFAVYYCQQYNNWPLTFGGGTKVEIKRTVAAPSVFIFPPSDEQLKSGTASVVCLLNNFYPREAKVQWKVDNALQSGNSQESVTEQDSKDSTYSLSSTLTLSKADYEKHKVYACEVTHQGLSSPVTKSFNRGEC

SEQ ID NO: 4295 - DNA, 642 bp, Artificial Sequence
  source: /note="Description of Artificial Sequence: Synthetic polynucleotide"
gaaatagtgatgacgcagtctccagccaccctgtctgtgtctccaggggaaagagccaccctctcctgcagggccagtcagagtgttgatgttaacttagcctggtaccagcagaaacctggccaggctcccaggctcctcatctacaacgcagccaccagggccactggtatcccagccaggttcagtggcagtgggtctgggacagagttcactctcaccatcagcagcctgcagtctgaagattttgcagtttattactgtcagcagtatcagaactggcctctcactttcggcggagggaccaaggtggagatcaaacgaacggtggctgcaccatctgtcttcatcttcccgccatctgatgagcagttgaaatctggaactgcctctgttgtgtgcctgctgaataacttctatcccagagaggccaaagtacagtggaaggtggataacgccctccaatcgggtaactcccaggagagtgtcacagagcaggacagcaaggacagcacctacagcctcagcagcaccctgacgctgagcaaagcagactacgagaaacacaaagtctacgcctgcgaagtcacccatcagggcctgagctcgcccgtcacaaagagcttcaacaggggagagtgt

SEQ ID NO: 4296 - protein, 214 aa, Artificial Sequence
  source: /note="Description of Artificial Sequence: Synthetic polypeptide"
EIVMTQSPATLSVSPGERATLSCRASQSVDVNLAWYQQKPGQAPRLLIYNAATRATGIPARFSGSGSGTEFTLTISSLQSEDFAVYYCQQYQNWPLTFGGGTKVEIKRTVAAPSVFIFPPSDEQLKSGTASVVCLLNNFYPREAKVQWKVDNALQSGNSQESVTEQDSKDSTYSLSSTLTLSKADYEKHKVYACEVTHQGLSSPVTKSFNRGEC

SEQ ID NO: 4297 - DNA, 642 bp, Artificial Sequence
  source: /note="Description of Artificial Sequence: Synthetic polynucleotide"
gaaatagtgatgacgcagtctccagccaccctgtctgtgtctccaggggaaagagccaccctctcctgcagggccagtcagagtgttgatgttaacttagcctggtaccagcagaaacctggccaggctcccaggctcctcatctacaacgcagccaccagggccactggtatcccagccagggtcagtggcagtgggtctgggacagagttcactctcaccatcagcagcctgcagtctgaagattttgcagtttattactgtcagcagtatcagaactggcctctcactttcggcggagggaccaaggtggagatcaaacgaacggtggctgcaccatctgtcttcatcttcccgccatctgatgagcagttgaaatctggaactgcctctgttgtgtgcctgctgaataacttctatcccagagaggccaaagtacagtggaaggtggataacgccctccaatcgggtaactcccaggagagtgtcacagagcaggacagcaaggacagcacctacagcctcagcagcaccctgacgctgagcaaagcagactacgagaaacacaaagtctacgcctgcgaagtcacccatcagggcctgagctcgcccgtcacaaagagcttcaacaggggagagtgt

SEQ ID NO: 4298 - protein, 214 aa, Artificial Sequence
  source: /note="Description of Artificial Sequence: Synthetic polypeptide"
EIVMTQSPATLSVSPGERATLSCRASQSVDVNLAWYQQKPGQAPRLLIYNAATRATGIPARVSGSGSGTEFTLTISSLQSEDFAVYYCQQYQNWPLTFGGGTKVEIKRTVAAPSVFIFPPSDEQLKSGTASVVCLLNNFYPREAKVQWKVDNALQSGNSQESVTEQDSKDSTYSLSSTLTLSKADYEKHKVYACEVTHQGLSSPVTKSFNRGEC

SEQ ID NO: 4299 - DNA, 642 bp, Artificial Sequence
  source: /note="Description of Artificial Sequence: Synthetic polynucleotide"
gaaatagtgatgacgcagtctccagccaccctgtctgtgtctccaggggaaagagccaccctctcctgcagggccagtcagagtgttcatacgaacttagcctggtaccagcagaaacctggccaggctcccaggctcctcatctacaacgcagccaccagggccactggtatcccagccaggttcagtggcagtgggtctgggacagagttcactctcaccatcagcagcctgcagtctgaagattttgcagtttattactgtcagcagtatcagaactggcctctcactttcggcggagggaccaaggtggagatcaaacgaacggtggctgcaccatctgtcttcatcttcccgccatctgatgagcagttgaaatctggaactgcctctgttgtgtgcctgctgaataacttctatcccagagaggccaaagtacagtggaaggtggataacgccctccaatcgggtaactcccaggagagtgtcacagagcaggacagcaaggacagcacctacagcctcagcagcaccctgacgctgagcaaagcagactacgagaaacacaaagtctacgcctgcgaagtcacccatcagggcctgagctcgcccgtcacaaagagcttcaacaggggagagtgt

SEQ ID NO: 4300 - protein, 214 aa, Artificial Sequence
  source: /note="Description of Artificial Sequence: Synthetic polypeptide"
EIVMTQSPATLSVSPGERATLSCRASQSVHTNLAWYQQKPGQAPRLLIYNAATRATGIPARFSGSGSGTEFTLTISSLQSEDFAVYYCQQYQNWPLTFGGGTKVEIKRTVAAPSVFIFPPSDEQLKSGTASVVCLLNNFYPREAKVQWKVDNALQSGNSQESVTEQDSKDSTYSLSSTLTLSKADYEKHKVYACEVTHQGLSSPVTKSFNRGEC

SEQ ID NO: 4301 - DNA, 642 bp, Artificial Sequence
  source: /note="Description of Artificial Sequence: Synthetic polynucleotide"
gaaatagtgatgacgcagtctccagccaccctgtctgtgtctccaggggaaagagccaccctctcctgcagggccagtcagagtgttaacctgaacttagcctggtaccagcagaaacctggccaggctcccaggctcctcatctaccaggcagccaccagggccactggtatcccagccaggttcagtggcagtgggtctgggacagagttcactctcaccatcagcagcctgcagtctgaagattttgcagtttattactgtcagcagtataaccagtggcctctcactttcggcggagggaccaaggtggagatcaaacgaacggtggctgcaccatctgtcttcatcttcccgccatctgatgagcagttgaaatctggaactgcctctgttgtgtgcctgctgaataacttctatcccagagaggccaaagtacagtggaaggtggataacgccctccaatcgggtaactcccaggagagtgtcacagagcaggacagcaaggacagcacctacagcctcagcagcaccctgacgctgagcaaagcagactacgagaaacacaaagtctacgcctgcgaagtcacccatcagggcctgagctcgcccgtcacaaagagcttcaacaggggagagtgt

SEQ ID NO: 4302 - protein, 214 aa, Artificial Sequence
  source: /note="Description of Artificial Sequence: Synthetic polypeptide"
EIVMTQSPATLSVSPGERATLSCRASQSVNLNLAWYQQKPGQAPRLLIYQAATRATGIPARFSGSGSGTEFTLTISSLQSEDFAVYYCQQYNQWPLTFGGGTKVEIKRTVAAPSVFIFPPSDEQLKSGTASVVCLLNNFYPREAKVQWKVDNALQSGNSQESVTEQDSKDSTYSLSSTLTLSKADYEKHKVYACEVTHQGLSSPVTKSFNRGEC

SEQ ID NO: 4303 - DNA, 642 bp, Artificial Sequence
  source: /note="Description of Artificial Sequence: Synthetic polynucleotide"
gaaatagtgatgacgcagtctccagccaccctgtctgtgtctccaggggaaagagccaccctctcctgcagggccagtcagagtgttttccagaacttagcctggtaccagcagaaacctggccaggctcccaggctcctcatctaccaggcagccaccagggccactggtatcccagccaggttcagtggcagtgggtctgggacagagttcactctcaccatcagcagcctgcagtctgaagattttgcagtttattactgtcagcagtataaccagtggcctctcactttcggcggagggaccaaggtggagatcaaacgaacggtggctgcaccatctgtcttcatcttcccgccatctgatgagcagttgaaatctggaactgcctctgttgtgtgcctgctgaataacttctatcccagagaggccaaagtacagtggaaggtggataacgccctccaatcgggtaactcccaggagagtgtcacagagcaggacagcaaggacagcacctacagcctcagcagcaccctgacgctgagcaaagcagactacgagaaacacaaagtctacgcctgcgaagtcacccatcagggcctgagctcgcccgtcacaaagagcttcaacaggggagagtgt

SEQ ID NO: 4304 - protein, 214 aa, Artificial Sequence
  source: /note="Description of Artificial Sequence: Synthetic polypeptide"
EIVMTQSPATLSVSPGERATLSCRASQSVFQNLAWYQQKPGQAPRLLIYQAATRATGIPARFSGSGSGTEFTLTISSLQSEDFAVYYCQQYNQWPLTFGGGTKVEIKRTVAAPSVFIFPPSDEQLKSGTASVVCLLNNFYPREAKVQWKVDNALQSGNSQESVTEQDSKDSTYSLSSTLTLSKADYEKHKVYACEVTHQGLSSPVTKSFNRGEC

SEQ ID NO: 4305 - DNA, 642 bp, Artificial Sequence; identical to SEQ ID NO: 4275
  source: /note="Description of Artificial Sequence: Synthetic polynucleotide"

SEQ ID NO: 4306 - protein, 214 aa, Artificial Sequence; identical to SEQ ID NO: 4276
  source: /note="Description of Artificial Sequence: Synthetic polypeptide"

SEQ ID NO: 4307 - DNA, 642 bp, Artificial Sequence
  source: /note="Description of Artificial Sequence: Synthetic polynucleotide"
gaaatagtgatgacgcagtctccagccaccctgtctgtgtctccaggggaaagagccaccctctcctgcagggccagtcagagtgttgatagacacttagcctggtaccagcagaaacctggccaggctcccaggctcctcatctacgaagcagccaccagggccactggtatcccagccagggtcagtggcagtgggtctgggacagagttcactctcaccatcagcagcctgcagtctgaagattttgcagtttattactgtcagcagtataaccagtggcctctcactttcggcggagggaccaaggtggagatcaaacgaacggtggctgcaccatctgtcttcatcttcccgccatctgatgagcagttgaaatctggaactgcctctgttgtgtgcctgctgaataacttctatcccagagaggccaaagtacagtggaaggtggataacgccctccaatcgggtaactcccaggagagtgtcacagagcaggacagcaaggacagcacctacagcctcagcagcaccctgacgctgagcaaagcagactacgagaaacacaaagtctacgcctgcgaagtcacccatcagggcctgagctcgcccgtcacaaagagcttcaacaggggagagtgt

SEQ ID NO: 4308 - protein, 214 aa, Artificial Sequence
  source: /note="Description of Artificial Sequence: Synthetic polypeptide"
EIVMTQSPATLSVSPGERATLSCRASQSVDRHLAWYQQKPGQAPRLLIYEAATRATGIPARVSGSGSGTEFTLTISSLQSEDFAVYYCQQYNQWPLTFGGGTKVEIKRTVAAPSVFIFPPSDEQLKSGTASVVCLLNNFYPREAKVQWKVDNALQSGNSQESVTEQDSKDSTYSLSSTLTLSKADYEKHKVYACEVTHQGLSSPVTKSFNRGEC

SEQ ID NO: 4309 - DNA, 642 bp, Artificial Sequence
  source: /note="Description of Artificial Sequence: Synthetic polynucleotide"
gaaatagtgatgacgcagtctccagccaccctgtctgtgtctccaggggaaagagccaccctctcctgcagggccagtcagagtgttaaccggcacttagcctggtaccagcagaaacctggccaggctcccaggctcctcatctacgaagcagccaccagggccactggtatcccagccaggttcagtggcagtgggtctgggacagagttcactctcaccatcagcagcctgcagtctgaagattttgcagtttattactgtcagcagtataaccagtggcctctcactttcggcggagggaccaaggtggagatcaaacgaacggtggctgcaccatctgtcttcatcttcccgccatctgatgagcagttgaaatctggaactgcctctgttgtgtgcctgctgaataacttctatcccagagaggccaaagtacagtggaaggtggataacgccctccaatcgggtaactcccaggagagtgtcacagagcaggacagcaaggacagcacctacagcctcagcagcaccctgacgctgagcaaagcagactacgagaaacacaaagtctacgcctgcgaagtcacccatcagggcctgagctcgcccgtcacaaagagcttcaacaggggagagtgt

SEQ ID NO: 4310 - protein, 214 aa, Artificial Sequence
  source: /note="Description of Artificial Sequence: Synthetic polypeptide"
EIVMTQSPATLSVSPGERATLSCRASQSVNRHLAWYQQKPGQAPRLLIYEAATRATGIPARFSGSGSGTEFTLTISSLQSEDFAVYYCQQYNQWPLTFGGGTKVEIKRTVAAPSVFIFPPSDEQLKSGTASVVCLLNNFYPREAKVQWKVDNALQSGNSQESVTEQDSKDSTYSLSSTLTLSKADYEKHKVYACEVTHQGLSSPVTKSFNRGEC

SEQ ID NO: 4311 - DNA, 642 bp, Artificial Sequence
  source: /note="Description of Artificial Sequence: Synthetic polynucleotide"
gaaatagtgatgacgcagtctccagccaccctgtctgtgtctccaggggaaagagccaccctctcctgcagggccagtcagagtgttgaaagacacttagcctggtaccagcagaaacctggccaggctcccaggctcctcatctacgaagcagccaccagggccactggtatcccagccaggttcagtggcagtgggtctgggacagagttcactctcaccatcagcagcctgcagtctgaagattttgcagtttattactgtcagcagtatcagcagtggcctctcactttcggcggagggaccaaggtggagatcaaacgaacggtggctgcaccatctgtcttcatcttcccgccatctgatgagcagttgaaatctggaactgcctctgttgtgtgcctgctgaataacttctatcccagagaggccaaagtacagtggaaggtggataacgccctccaatcgggtaactcccaggagagtgtcacagagcaggacagcaaggacagcacctacagcctcagcagcaccctgacgctgagcaaagcagactacgagaaacacaaagtctacgcctgcgaagtcacccatcagggcctgagctcgcccgtcacaaagagcttcaacaggggagagtgt

SEQ ID NO: 4312 - protein, 214 aa, Artificial Sequence
  source: /note="Description of Artificial Sequence: Synthetic polypeptide"
EIVMTQSPATLSVSPGERATLSCRASQSVERHLAWYQQKPGQAPRLLIYEAATRATGIPARFSGSGSGTEFTLTISSLQSEDFAVYYCQQYQQWPLTFGGGTKVEIKRTVAAPSVFIFPPSDEQLKSGTASVVCLLNNFYPREAKVQWKVDNALQSGNSQESVTEQDSKDSTYSLSSTLTLSKADYEKHKVYACEVTHQGLSSPVTKSFNRGEC

SEQ ID NO: 4313 - DNA, 642 bp, Artificial Sequence; identical to SEQ ID NO: 4211
  source: /note="Description of Artificial Sequence: Synthetic polynucleotide"

SEQ ID NO: 4314 - protein, 214 aa, Artificial Sequence; identical to SEQ ID NO: 4212
  source: /note="Description of Artificial Sequence: Synthetic polypeptide"

SEQ ID NO: 4315 - DNA, 642 bp, Artificial Sequence; identical to SEQ ID NO: 4219
  source: /note="Description of Artificial Sequence: Synthetic polynucleotide"

SEQ ID NO: 4316 - protein, 214 aa, Artificial Sequence; identical to SEQ ID NO: 4220
  source: /note="Description of Artificial Sequence: Synthetic polypeptide"

SEQ ID NO: 4317 - DNA, 642 bp, Artificial Sequence
  source: /note="Description of Artificial Sequence: Synthetic polynucleotide"
gaaatagtgatgacgcagtctccagccaccctgtctgtgtctccaggggaaagagccaccctctcctgcagggccagtcagagtgttaacagacacttagcctggtaccagcagaaacctggccaggctcccaggctcctcatctacgaagcagccaccagggccactggtatcccagccaggttcagtggcagtgggtctgggacagagttcactctcaccatcagcagcctgcagtctgaagattttgcagtttattactgtcagcagtataacaactggcctctcactttcggcggagggaccaaggtggagatcaaacgaacggtggctgcaccatctgtcttcatcttcccgccatctgatgagcagttgaaatctggaactgcctctgttgtgtgcctgctgaataacttctatcccagagaggccaaagtacagtggaaggtggataacgccctccaatcgggtaactcccaggagagtgtcacagagcaggacagcaaggacagcacctacagcctcagcagcaccctgacgctgagcaaagcagactacgagaaacacaaagtctacgcctgcgaagtcacccatcagggcctgagctcgcccgtcacaaagagcttcaacaggggagagtgt

SEQ ID NO: 4318 - protein, 214 aa, Artificial Sequence
  source: /note="Description of Artificial Sequence: Synthetic polypeptide"
EIVMTQSPATLSVSPGERATLSCRASQSVNRHLAWYQQKPGQAPRLLIYEAATRATGIPARFSGSGSGTEFTLTISSLQSEDFAVYYCQQYNNWPLTFGGGTKVEIKRTVAAPSVFIFPPSDEQLKSGTASVVCLLNNFYPREAKVQWKVDNALQSGNSQESVTEQDSKDSTYSLSSTLTLSKADYEKHKVYACEVTHQGLSSPVTKSFNRGEC

SEQ ID NO: 4319 - DNA, 642 bp, Artificial Sequence
  source: /note="Description of Artificial Sequence: Synthetic polynucleotide"
gaaatagtgatgacgcagtctccagccaccctgtctgtgtctccaggggaaagagccaccctctcctgcagggccagtcagagtgttaccagccacttagcctggtaccagcagaaacctggccaggctcccaggctcctcatctacgaagcagccaccagggccactggtatcccagccaggttcagtggcagtgggtctgggacagagttcactctcaccatcagcagcctgcagtctgaagattttgcagtttattactgtcagcagtataaccagtggcctctcactttcggcggagggaccaaggtggagatcaaacgaacggtggctgcaccatctgtcttcatcttcccgccatctgatgagcagttgaaatctggaactgcctctgttgtgtgcctgctgaataacttctatcccagagaggccaaagtacagtggaaggtggataacgccctccaatcgggtaactcccaggagagtgtcacagagcaggacagcaaggacagcacctacagcctcagcagcaccctgacgctgagcaaagcagactacgagaaacacaaagtctacgcctgcgaagtcacccatcagggcctgagctcgcccgtcacaaagagcttcaacaggggagagtgt

SEQ ID NO: 4320 - protein, 214 aa, Artificial Sequence
  source: /note="Description of Artificial Sequence: Synthetic polypeptide"
EIVMTQSPATLSVSPGERATLSCRASQSVTSHLAWYQQKPGQAPRLLIYEAATRATGIPARFSGSGSGTEFTLTISSLQSEDFAVYYCQQYNQWPLTFGGGTKVEIKRTVAAPSVFIFPPSDEQLKSGTASVVCLLNNFYPREAKVQWKVDNALQSGNSQESVTEQDSKDSTYSLSSTLTLSKADYEKHKVYACEVTHQGLSSPVTKSFNRGEC

SEQ ID NO: 4321 - DNA, 642 bp, Artificial Sequence
  source: /note="Description of Artificial Sequence: Synthetic polynucleotide"
gaaatagtgatgacgcagtctccagccaccctgtctgtgtctccaggggaaagagccaccctctcctgcagggccagtcagagtgttgatcagcacttagcctggtaccagcagaaacctggccaggctcccaggctcctcatctaccaggcagccaccagggccactggtatcccagccaggttcagtggcagtgggtctgggacagagttcactctcaccatcagcagcctgcagtctgaagattttgcagtttattactgtcagcagtatcagaactggcctctcactttcggcggagggaccaaggtggagatcaaacgaacggtggctgcaccatctgtcttcatcttcccgccatctgatgagcagttgaaatctggaactgcctctgttgtgtgcctgctgaataacttctatcccagagaggccaaagtacagtggaaggtggataacgccctccaatcgggtaactcccaggagagtgtcacagagcaggacagcaaggacagcacctacagcctcagcagcaccctgacgctgagcaaagcagactacgagaaacacaaagtctacgcctgcgaagtcacccatcagggcctgagctcgcccgtcacaaagagcttcaacaggggagagtgt

SEQ ID NO: 4322 - protein, 214 aa, Artificial Sequence
  source: /note="Description of Artificial Sequence: Synthetic polypeptide"
EIVMTQSPATLSVSPGERATLSCRASQSVDQHLAWYQQKPGQAPRLLIYQAATRATGIPARFSGSGSGTEFTLTISSLQSEDFAVYYCQQYQNWPLTFGGGTKVEIKRTVAAPSVFIFPPSDEQLKSGTASVVCLLNNFYPREAKVQWKVDNALQSGNSQESVTEQDSKDSTYSLSSTLTLSKADYEKHKVYACEVTHQGLSSPVTKSFNRGEC

SEQ ID NO: 4323 - DNA, 708 bp, Artificial Sequence
  source: /note="Description of Artificial Sequence: Synthetic polynucleotide"
atggacatgagggtgcccgctcagctcctggggctcctgctgctgtggctgagaggtgcgcgctgtgaaatcgtgatgacgcagtctccagccaccctgtctgtgtctccaggggaaagagccaccctctcctgcagggccagtcagagtgttagcgaacacttagcctggtaccagcagaaacctggccaggctcccaggctcctcatctacgaagcagccaccagggccactggtatcccagccaggttcagtggcagtgggtctgggacagagttcactctcaccatcagcagcctgcagtctgaagattttgcagtttattactgtcagcagtatcagaactggcctctcactttcggcggagggaccaaggtggagatcaaacgaacggtggctgcaccatctgtcttcatcttcccgccatctgatgagcagttgaaatctggaactgcctctgttgtgtgcctgctgaataacttctatcccagagaggccaaagtacagtggaaggtggataacgccctccaatcgggtaactcccaggagagtgtcacagagcaggacagcaaggacagcacctacagcctcagcagcaccctgacgctgagcaaagcagactacgagaaacacaaagtctacgcctgcgaagtcacccatcagggcctgagctcgcccgtcacaaagagcttcaacaggggagagtgt

SEQ ID NO: 4324 - protein, 214 aa, Artificial Sequence; identical to SEQ ID NO: 4230
  source: /note="Description of Artificial Sequence: Synthetic polypeptide"

SEQ ID NO: 4325 - DNA, 708 bp, Artificial Sequence
  source: /note="Description of Artificial Sequence: Synthetic polynucleotide"
atggacatgagggtgcccgctcagctcctggggctcctgctgctgtggctgagaggtgcgcgctgtgaaatcgtgatgacgcagtctccagccaccctgtctgtgtctccaggggaaagagccaccctctcctgcagggccagtcagagtgttagcagcaacttagcctggtaccagcagaaacctggccaggctcccaggctcctcatctatggtgcagccaccagggccactggtatcccagccaggttcagtggcagtgggtctgggacagagttcactctcaccatcagcagcctgcagtctgaagattttgcagtttattactgtcagcagtataataactggcctctcactttcggcggagggaccaaggtggagatcaaacgaacggtggctgcaccatctgtcttcatcttcccgccatctgatgagcagttgaaatctggaactgcctctgttgtgtgcctgctgaataacttctatcccagagaggccaaagtacagtggaaggtggataacgccctccaatcgggtaactcccaggagagtgtcacagagcaggacagcaaggacagcacctacagcctcagcagcaccctgacgctgagcaaagcagactacgagaaacacaaagtctacgcctgcgaagtcacccatcagggcctgagctcgcccgtcacaaagagcttcaacaggggagagtgt

SEQ ID NO: 4326 - protein, 214 aa, Artificial Sequence; identical to SEQ ID NO: 385
  source: /note="Description of Artificial Sequence: Synthetic polypeptide"

SEQ ID NO: 4327 - DNA, 708 bp, Artificial Sequence
  source: /note="Description of Artificial Sequence: Synthetic polynucleotide"
atggacatgagggtgcccgctcagctcctggggctcctgctgctgtggctgagaggtgcgcgctgtgaaatcgtgctgacgcagtctccagccaccctgtctctgtctccaggggaaagagccaccctctcctgcagggccagtcagagtgttagcagcaacttagcctggtaccagcagaaacctggccaggctcccaggctcctcatctatggtgcagccaccagggccactggtatcccagacaggttcagtggcagtgggtctgggacagagttcactctcaccatcagcaggctggagcctgaagattttgcagtttattactgtcagcagtataataactggcctctcactttcggcggagggaccaaggtggagatcaaacgaacggtggctgcaccatctgtcttcatcttcccgccatctgatgagcagttgaaatctggaactgcctctgttgtgtgcctgctgaataacttctatcccagagaggccaaagtacagtggaaggtggataacgccctccaatcgggtaactcccaggagagtgtcacagagcaggacagcaaggacagcacctacagcctcagcagcaccctgacgctgagcaaagcagactacgagaaacacaaagtctacgcctgcgaagtcacccatcagggcctgagctcgcccgtcacaaagagcttcaacaggggagagtgt

SEQ ID NO: 4328 - protein, 214 aa, Artificial Sequence
  source: /note="Description of Artificial Sequence: Synthetic polypeptide"
EIVLTQSPATLSLSPGERATLSCRASQSVSSNLAWYQQKPGQAPRLLIYGAATRATGIPDRFSGSGSGTEFTLTISRLEPEDFAVYYCQQYNNWPLTFGGGTKVEIKRTVAAPSVFIFPPSDEQLKSGTASVVCLLNNFYPREAKVQWKVDNALQSGNSQESVTEQDSKDSTYSLSSTLTLSKADYEKHKVYACEVTHQGLSSPVTKSFNRGEC

SEQ ID NO: 4329 - DNA, 708 bp, Artificial Sequence
  source: /note="Description of Artificial Sequence: Synthetic polynucleotide"
atggacatgagggtgcccgctcagctcctggggctcctgctgctgtggctgagaggtgcgcgctgtgaaatcgtgctgacgcagtctccagccaccctgtctctgtctccaggggaaagagccaccctctcctgcagggccagtcagagtgttagcgaacacttagcctggtaccagcagaaacctggccaggctcccaggctcctcatctacgaagcagccaccagggccactggtatcccagacaggttcagtggcagtgggtctgggacagagttcactctcaccatcagcaggctggagcctgaagattttgcagtttattactgtcagcagtatcagaactggcctctcactttcggcggagggaccaaggtggagatcaaacgaacggtggctgcaccatctgtcttcatcttcccgccatctgatgagcagttgaaatctggaactgcctctgttgtgtgcctgctgaataacttctatcccagagaggccaaagtacagtggaaggtggataacgccctccaatcgggtaactcccaggagagtgtcacagagcaggacagcaaggacagcacctacagcctcagcagcaccctgacgctgagcaaagcagactacgagaaacacaaagtctacgcctgcgaagtcacccatcagggcctgagctcgcccgtcacaaagagcttcaacaggggagagtgt

SEQ ID NO: 4330 - protein, 214 aa, Artificial Sequence
  source: /note="Description of Artificial Sequence: Synthetic polypeptide"
EIVLTQSPATLSLSPGERATLSCRASQSVSEHLAWYQQKPGQAPRLLIYEAATRATGIPDRFSGSGSGTEFTLTISRLEPEDFAVYYCQQYQNWPLTFGGGTKVEIKRTVAAPSVFIFPPSDEQLKSGTASVVCLLNNFYPREAKVQWKVDNALQSGNSQESVTEQDSKDSTYSLSSTLTLSKADYEKHKVYACEVTHQGLSSPVTKSFNRGEC

SEQ ID NO: 4331 - DNA, 708 bp, Artificial Sequence; identical to SEQ ID NO: 4327
  source: /note="Description of Artificial Sequence: Synthetic polynucleotide"

SEQ ID NO: 4332 - protein, 214 aa, Artificial Sequence; identical to SEQ ID NO: 4328
  source: /note="Description of Artificial Sequence: Synthetic polypeptide"

SEQ ID NO: 4333 - DNA, 708 bp, Artificial Sequence
  source: /note="Description of Artificial Sequence: Synthetic polynucleotide"
atggacatgagggtgcccgctcagctcctggggctcctgctgctgtggctgagaggtgcgcgctgtgaaatcgtgctgacgcagtctccagccaccctgtctctgtctccaggggaaagagccaccctctcctgcagggccagtcagagtgttgatctgcacttagcctggtaccagcagaaacctggccaggctcccaggctcctcatctacgaagcagccaccagggccactggtatcccagacaggttcagtggcagtgggtctgggacagagttcactctcaccatcagcaggctggagcctgaagattttgcagtttattactgtcagcagtatcagaactggcctctcactttcggcggagggaccaaggtggagatcaaacgaacggtggctgcaccatctgtcttcatcttcccgccatctgatgagcagttgaaatctggaactgcctctgttgtgtgcctgctgaataacttctatcccagagaggccaaagtacagtggaaggtggataacgccctccaatcgggtaactcccaggagagtgtcacagagcaggacagcaaggacagcacctacagcctcagcagcaccctgacgctgagcaaagcagactacgagaaacacaaagtctacgcctgcgaagtcacccatcagggcctgagctcgcccgtcacaaagagcttcaacaggggagagtgt

SEQ ID NO: 4334 - protein, 214 aa, Artificial Sequence
  source: /note="Description of Artificial Sequence: Synthetic polypeptide"
EIVLTQSPATLSLSPGERATLSCRASQSVDLHLAWYQQKPGQAPRLLIYEAATRATGIPDRFSGSGSGTEFTLTISRLEPEDFAVYYCQQYQNWPLTFGGGTKVEIKRTVAAPSVFIFPPSDEQLKSGTASVVCLLNNFYPREAKVQWKVDNALQSGNSQESVTEQDSKDSTYSLSSTLTLSKADYEKHKVYACEVTHQGLSSPVTKSFNRGEC

SEQ ID NO: 4335 - DNA, 708 bp, Artificial Sequence
  source: /note="Description of Artificial Sequence: Synthetic polynucleotide"
atggacatgagggtgcccgctcagctcctggggctcctgctgctgtggctgagaggtgcgcgctgtgaaatcgtgctgacgcagtctccagccaccctgtctctgtctccaggggaaagagccaccctctcctgcagggccagtcagagtgttaacctgaacttagcctggtaccagcagaaacctggccaggctcccaggctcctcatctaccaggcagccaccagggccactggtatcccagacaggttcagtggcagtgggtctgggacagagttcactctcaccatcagcaggctggagcctgaagattttgcagtttattactgtcagcagtataaccagtggcctctcactttcggcggagggaccaaggtggagatcaaacgaacggtggctgcaccatctgtcttcatcttcccgccatctgatgagcagttgaaatctggaactgcctctgttgtgtgcctgctgaataacttctatcccagagaggccaaagtacagtggaaggtggataacgccctccaatcgggtaactcccaggagagtgtcacagagcaggacagcaaggacagcacctacagcctcagcagcaccctgacgctgagcaaagcagactacgagaaacacaaagtctacgcctgcgaagtcacccatcagggcctgagctcgcccgtcacaaagagcttcaacaggggagagtgt

SEQ ID NO: 4336 - protein, 214 aa, Artificial Sequence
  source: /note="Description of Artificial Sequence: Synthetic polypeptide"
EIVLTQSPATLSLSPGERATLSCRASQSVNLNLAWYQQKPGQAPRLLIYQAATRATGIPDRFSGSGSGTEFTLTISRLEPEDFAVYYCQQYNQWPLTFGGGTKVEIKRTVAAPSVFIFPPSDEQLKSGTASVVCLLNNFYPREAKVQWKVDNALQSGNSQESVTEQDSKDSTYSLSSTLTLSKADYEKHKVYACEVTHQGLSSPVTKSFNRGEC

SEQ ID NO: 4337 - DNA, 708 bp, Artificial Sequence
  source: /note="Description of Artificial Sequence: Synthetic polynucleotide"
atggacatgagggtgcccgctcagctcctggggctcctgctgctgtggctgagaggtgcgcgctgtgaaatcgtgctgacgcagtctccagccaccctgtctctgtctccaggggaaagagccaccctctcctgcagggccagtcagagtgttttcagccacttagcctggtaccagcagaaacctggccaggctcccaggctcctcatctacgaagcagccaccagggccactggtatcccagacaggttcagtggcagtgggtctgggacagagttcactctcaccatcagcaggctggagcctgaagattttgcagtttattactgtcagcagtatcagaactggcctctcactttcggcggagggaccaaggtggagatcaaacgaacggtggctgcaccatctgtcttcatcttcccgccatctgatgagcagttgaaatctggaactgcctctgttgtgtgcctgctgaataacttctatcccagagaggccaaagtacagtggaaggtggataacgccctccaatcgggtaactcccaggagagtgtcacagagcaggacagcaaggacagcacctacagcctcagcagcaccctgacgctgagcaaagcagactacgagaaacacaaagtctacgcctgcgaagtcacccatcagggcctgagctcgcccgtcacaaagagcttcaacaggggagagtgt

SEQ ID NO: 4338 - protein, 214 aa, Artificial Sequence
  source: /note="Description of Artificial Sequence: Synthetic polypeptide"
EIVLTQSPATLSLSPGERATLSCRASQSVFSHLAWYQQKPGQAPRLLIYEAATRATGIPDRFSGSGSGTEFTLTISRLEPEDFAVYYCQQYQNWPLTFGGGTKVEIKRTVAAPSVFIFPPSDEQLKSGTASVVCLLNNFYPREAKVQWKVDNALQSGNSQESVTEQDSKDSTYSLSSTLTLSKADYEKHKVYACEVTHQGLSSPVTKSFNRGEC

SEQ ID NO: 4339 - DNA, 1350 bp, Artificial Sequence
  source: /note="Description of Artificial Sequence: Synthetic polynucleotide"
caggtgcagctggtggagtctgggggaggcgtggtccagcctgggaggtccctgagactctcctgtgcagcatctggattcaccttcagtaactatggcatgcactgggtccgccaggctccaggcgaggggctggagtgggtggcagctatatggtttgatgcaagtgataaatactatgcagacgccgtgaagggccgattcaccatctccagagacaactccaagaacacgctgtatctgcaaatgaacagcctgagagccgaggacacggctgtgtattactgtgcgagagatttggcgatttttggagtggtccccgactactggggccagggaaccctggtcaccgtgtctagtgcctccaccaagggcccatcggtcttccccctggcaccctcctccaagagcacctctgggggcacagcggccctgggctgcctggtcaaggactacttccccgaaccggtgacggtgtcgtggaactcaggcgccctgaccagcggcgtgcacaccttcccggctgtcctacagtcctcaggactctactccctcagcagcgtggtgaccgtgccctccagcagcttgggcacccagacctacatctgcaacgtgaatcacaagcccagcaacaccaaggtggacaagaaagttgagcccaaatcttgtgacaaaactcacacatgcccaccgtgcccagcacctgaactcctggggggaccgtcagtcttcctcttccccccaaaacccaaggacaccctcatgatctcccggacccctgaggtcacatgcgtggtggtggacgtgagccacgaagaccctgaggtcaagttcaactggtacgtggacggcgtggaggtgcataatgccaagacaaagccgtgcgaggagcagtacggcagcacgtaccgttgcgtcagcgtcctcaccgtcctgcaccaggactggctgaatggcaaggagtacaagtgcaaggtgtccaacaaagccctcccagcccccatcgagaaaaccatctccaaagccaaagggcagccccgagaaccacaggtgtacaccctgcccccatcccgggaggagatgaccaagaaccaggtcagcctgacctgcctggtcaaaggcttctatcccagcgacatcgccgtggagtgggagagcaatgggcagccggagaacaactacaagaccacgcctcccgtgctggactccgacggctccttcttcctctatagcaagctcaccgtggacaagagcaggtggcagcaggggaacgtcttctcatgctccgtgatgcatgaggctctgcacaaccactacacgcagaagagcctctccctgtctccgggtaaa

SEQ ID NO: 4340 - protein, 450 aa, Artificial Sequence
  source: /note="Description of Artificial Sequence: Synthetic polypeptide"
QVQLVESGGGVVQPGRSLRLSCAASGFTFSNYGMHWVRQAPGEGLEWVAAIWFDASDKYYADAVKGRFTISRDNSKNTLYLQMNSLRAEDTAVYYCARDLAIFGVVPDYWGQGTLVTVSSASTKGPSVFPLAPSSKSTSGGTAALGCLVKDYFPEPVTVSWNSGALTSGVHTFPAVLQSSGLYSLSSVVTVPSSSLGTQTYICNVNHKPSNTKVDKKVEPKSCDKTHTCPPCPAPELLGGPSVFLFPPKPKDTLMISRTPEVTCVVVDVSHEDPEVKFNWYVDGVEVHNAKTKPCEEQYGSTYRCVSVLTVLHQDWLNGKEYKCKVSNKALPAPIEKTISKAKGQPREPQVYTLPPSREEMTKNQVSLTCLVKGFYPSDIAVEWESNGQPENNYKTTPPVLDSDGSFFLYSKLTVDKSRWQQGNVFSCSVMHEALHNHYTQKSLSLSPGK

SEQ ID NO: 4341 - DNA, 1350 bp, Artificial Sequence; identical to SEQ ID NO: 4339
  source: /note="Description of Artificial Sequence: Synthetic polynucleotide"

SEQ ID NO: 4342 - protein, 450 aa, Artificial Sequence; identical to SEQ ID NO: 4340
  source: /note="Description of Artificial Sequence: Synthetic polypeptide"

SEQ ID NO: 4343 - DNA, 1350 bp, Artificial Sequence; identical to SEQ ID NO: 4339
  source: /note="Description of Artificial Sequence: Synthetic polynucleotide"

SEQ ID NO: 4344 - protein, 450 aa, Artificial Sequence; identical to SEQ ID NO: 4340
  source: /note="Description of Artificial Sequence: Synthetic polypeptide"

SEQ ID NO: 4345 - DNA, 1350 bp, Artificial Sequence; identical to SEQ ID NO: 4339
  source: /note="Description of Artificial Sequence: Synthetic polynucleotide"

SEQ ID NO: 4346 - protein, 450 aa, Artificial Sequence; identical to SEQ ID NO: 4340
  source: /note="Description of Artificial Sequence: Synthetic polypeptide"

SEQ ID NO: 4347 - DNA, 1350 bp, Artificial Sequence; identical to SEQ ID NO: 4339
  source: /note="Description of Artificial Sequence: Synthetic polynucleotide"

SEQ ID NO: 4348 - protein, 450 aa, Artificial Sequence; identical to SEQ ID NO: 4340
  source: /note="Description of Artificial Sequence: Synthetic polypeptide"

SEQ ID NO: 4349 - DNA, 1350 bp, Artificial Sequence; identical to SEQ ID NO: 4339
  source: /note="Description of Artificial Sequence: Synthetic polynucleotide"

SEQ ID NO: 4350 - protein, 450 aa, Artificial Sequence; identical to SEQ ID NO: 4340
  source: /note="Description of Artificial Sequence: Synthetic polypeptide"

SEQ ID NO: 4351 - DNA, 1350 bp, Artificial Sequence; identical to SEQ ID NO: 4339
  source: /note="Description of Artificial Sequence: Synthetic polynucleotide"

SEQ ID NO: 4352 - protein, 450 aa, Artificial Sequence; identical to SEQ ID NO: 4340
  source: /note="Description of Artificial Sequence: Synthetic polypeptide"

SEQ ID NO: 4353 - DNA, 1350 bp, Artificial Sequence; identical to SEQ ID NO: 4339
  source: /note="Description of Artificial Sequence: Synthetic polynucleotide"

SEQ ID NO: 4354 - protein, 450 aa, Artificial Sequence; identical to SEQ ID NO: 4340
  source: /note="Description of Artificial Sequence: Synthetic polypeptide"

SEQ ID NO: 4355 - DNA, 1350 bp, Artificial Sequence; identical to SEQ ID NO: 4339
  source: /note="Description of Artificial Sequence: Synthetic polynucleotide"

SEQ ID NO: 4356 - protein, 450 aa, Artificial Sequence; identical to SEQ ID NO: 4340
  source: /note="Description of Artificial Sequence: Synthetic polypeptide"

SEQ ID NO: 4357 - DNA, 1350 bp, Artificial Sequence; identical to SEQ ID NO: 4339
  source: /note="Description of Artificial Sequence: Synthetic polynucleotide"

SEQ ID NO: 4358 - protein, 450 aa, Artificial Sequence; identical to SEQ ID NO: 4340
  source: /note="Description of Artificial Sequence: Synthetic polypeptide"

SEQ ID NO: 4359 - DNA, 1350 bp, Artificial Sequence; identical to SEQ ID NO: 4339
  source: /note="Description of Artificial Sequence: Synthetic polynucleotide"

SEQ ID NO: 4360 - protein, 450 aa, Artificial Sequence; identical to SEQ ID NO: 4340
  source: /note="Description of Artificial Sequence: Synthetic polypeptide"

SEQ ID NO: 4361 - DNA, 1350 bp, Artificial Sequence; identical to SEQ ID NO: 4339
  source: /note="Description of Artificial Sequence: Synthetic polynucleotide"

SEQ ID NO: 4362 - protein, 450 aa, Artificial Sequence; identical to SEQ ID NO: 4340
  source: /note="Description of Artificial Sequence: Synthetic polypeptide"

SEQ ID NO: 4363 - DNA, 1350 bp, Artificial Sequence; identical to SEQ ID NO: 4339
  source: /note="Description of Artificial Sequence: Synthetic polynucleotide"

SEQ ID NO: 4364 - protein, 450 aa, Artificial Sequence; identical to SEQ ID NO: 4340
  source: /note="Description of Artificial Sequence: Synthetic polypeptide"

SEQ ID NO: 4365 - DNA, 1350 bp, Artificial Sequence
  source: /note="Description of Artificial Sequence: Synthetic polynucleotide"
caggtgcagctggtggagtctgggggaggcgtggtccagcctgggaggtccctgagactctcctgtgcagcatctggattcaccttcagtaactatggcatgcactgggtccgccaggctccaggcgaggggctggagtgggtggcagctatatggtttgatgcaagtgataaatactatgcagacgccgtgaagggccgattcaccatctccagagacaactccaagaacacgctgtatctgcaaatgaacagcctgagagccgaggacacggctgtgtattactgtgcgagagatctggcgatttttggagtgattcccgactactggggccagggaaccctggtcaccgtgtctagtgcctccaccaagggcccatcggtcttccccctggcaccctcctccaagagcacctctgggggcacagcggccctgggctgcctggtcaaggactacttccccgaaccggtgacggtgtcgtggaactcaggcgccctgaccagcggcgtgcacaccttcccggctgtcctacagtcctcaggactctactccctcagcagcgtggtgaccgtgccctccagcagcttgggcacccagacctacatctgcaacgtgaatcacaagcccagcaacaccaaggtggacaagaaagttgagcccaaatcttgtgacaaaactcacacatgcccaccgtgcccagcacctgaactcctggggggaccgtcagtcttcctcttccccccaaaacccaaggacaccctcatgatctcccggacccctgaggtcacatgcgtggtggtggacgtgagccacgaagaccctgaggtcaagttcaactggtacgtggacggcgtggaggtgcataatgccaagacaaagccgtgcgaggagcagtacggcagcacgtaccgttgcgtcagcgtcctcaccgtcctgcaccaggactggctgaatggcaaggagtacaagtgcaaggtgtccaacaaagccctcccagcccccatcgagaaaaccatctccaaagccaaagggcagccccgagaaccacaggtgtacaccctgcccccatcccgggaggagatgaccaagaaccaggtcagcctgacctgcctggtcaaaggcttctatcccagcgacatcgccgtggagtgggagagcaatgggcagccggagaacaactacaagaccacgcctcccgtgctggactccgacggctccttcttcctctatagcaagctcaccgtggacaagagcaggtggcagcaggggaacgtcttctcatgctccgtgatgcatgaggctctgcacaaccactacacgcagaagagcctctccctgtctccgggtaaa

SEQ ID NO: 4366 - protein, 450 aa, Artificial Sequence
  source: /note="Description of Artificial Sequence: Synthetic polypeptide"
QVQLVESGGGVVQPGRSLRLSCAASGFTFSNYGMHWVRQAPGEGLEWVAAIWFDASDKYYADAVKGRFTISRDNSKNTLYLQMNSLRAEDTAVYYCARDLAIFGVIPDYWGQGTLVTVSSASTKGPSVFPLAPSSKSTSGGTAALGCLVKDYFPEPVTVSWNSGALTSGVHTFPAVLQSSGLYSLSSVVTVPSSSLGTQTYICNVNHKPSNTKVDKKVEPKSCDKTHTCPPCPAPELLGGPSVFLFPPKPKDTLMISRTPEVTCVVVDVSHEDPEVKFNWYVDGVEVHNAKTKPCEEQYGSTYRCVSVLTVLHQDWLNGKEYKCKVSNKALPAPIEKTISKAKGQPREPQVYTLPPSREEMTKNQVSLTCLVKGFYPSDIAVEWESNGQPENNYKTTPPVLDSDGSFFLYSKLTVDKSRWQQGNVFSCSVMHEALHNHYTQKSLSLSPGK

SEQ ID NO: 4367 - DNA, 1350 bp, Artificial Sequence; identical to SEQ ID NO: 4339
  source: /note="Description of Artificial Sequence: Synthetic polynucleotide"

SEQ ID NO: 4368 - protein, 450 aa, Artificial Sequence; identical to SEQ ID NO: 4340
  source: /note="Description of Artificial Sequence: Synthetic polypeptide"

SEQ ID NO: 4369 - DNA, 1350 bp, Artificial Sequence; identical to SEQ ID NO: 4339
  source: /note="Description of Artificial Sequence: Synthetic polynucleotide"

SEQ ID NO: 4370 - protein, 450 aa, Artificial Sequence; identical to SEQ ID NO: 4340
  source: /note="Description of Artificial Sequence: Synthetic polypeptide"

SEQ ID NO: 4371 - DNA, 1350 bp, Artificial Sequence
  source: /note="Description of Artificial Sequence: Synthetic polynucleotide"
caggtgcagctggtggagtctgggggaggcgtggtccagcctgggaggtccctgagactctcctgtgcagcatctggattcaccttccagaactatggcatgcactgggtccgccaggctccaggcgaggggctggagtgggtggcagctatatggtttgatgcgtctgacaaatactatgcagacgccgtgaagggccgattcaccatctccagagacaactccaagaacacgctgtatctgcaaatgaacagcctgagagccgaggacacggctgtgtattactgtgcgagagatcttgcgatttttggagtggtccccgactactggggccagggaaccctggtcaccgtgtctagtgcctccaccaagggcccatcggtcttccccctggcaccctcctccaagagcacctctgggggcacagcggccctgggctgcctggtcaaggactacttccccgaaccggtgacggtgtcgtggaactcaggcgccctgaccagcggcgtgcacaccttcccggctgtcctacagtcctcaggactctactccctcagcagcgtggtgaccgtgccctccagcagcttgggcacccagacctacatctgcaacgtgaatcacaagcccagcaacaccaaggtggacaagaaagttgagcccaaatcttgtgacaaaactcacacatgcccaccgtgcccagcacctgaactcctggggggaccgtcagtcttcctcttccccccaaaacccaaggacaccctcatgatctcccggacccctgaggtcacatgcgtggtggtggacgtgagccacgaagaccctgaggtcaagttcaactggtacgtggacggcgtggaggtgcataatgccaagacaaagccgtgcgaggagcagtacggcagcacgtaccgttgcgtcagcgtcctcaccgtcctgcaccaggactggctgaatggcaaggagtacaagtgcaaggtgtccaacaaagccctcccagcccccatcgagaaaaccatctccaaagccaaagggcagccccgagaaccacaggtgtacaccctgcccccatcccgggaggagatgaccaagaaccaggtcagcctgacctgcctggtcaaaggcttctatcccagcgacatcgccgtggagtgggagagcaatgggcagccggagaacaactacaagaccacgcctcccgtgctggactccgacggctccttcttcctctatagcaagctcaccgtggacaagagcaggtggcagcaggggaacgtcttctcatgctccgtgatgcatgaggctctgcacaaccactacacgcagaagagcctctccctgtctccgggtaaa

SEQ ID NO: 4372 - protein, 450 aa, Artificial Sequence
  source: /note="Description of Artificial Sequence: Synthetic polypeptide"
QVQLVESGGGVVQPGRSLRLSCAASGFTFQNYGMHWVRQAPGEGLEWVAAIWFDASDKYYADAVKGRFTISRDNSKNTLYLQMNSLRAEDTAVYYCARDLAIFGVVPDYWGQGTLVTVSSASTKGPSVFPLAPSSKSTSGGTAALGCLVKDYFPEPVTVSWNSGALTSGVHTFPAVLQSSGLYSLSSVVTVPSSSLGTQTYICNVNHKPSNTKVDKKVEPKSCDKTHTCPPCPAPELLGGPSVFLFPPKPKDTLMISRTPEVTCVVVDVSHEDPEVKFNWYVDGVEVHNAKTKPCEEQYGSTYRCVSVLTVLHQDWLNGKEYKCKVSNKALPAPIEKTISKAKGQPREPQVYTLPPSREEMTKNQVSLTCLVKGFYPSDIAVEWESNGQPENNYKTTPPVLDSDGSFFLYSKLTVDKSRWQQGNVFSCSVMHEALHNHYTQKSLSLSPGK

SEQ ID NO: 4373 - DNA, 1350 bp, Artificial Sequence; identical to SEQ ID NO: 4371
  source: /note="Description of Artificial Sequence: Synthetic polynucleotide"

SEQ ID NO: 4374 - protein, 450 aa, Artificial Sequence; identical to SEQ ID NO: 4372
  source: /note="Description of Artificial Sequence: Synthetic polypeptide"

SEQ ID NO: 4375 - DNA, 1350 bp, Artificial Sequence; identical to SEQ ID NO: 4371
  source: /note="Description of Artificial Sequence: Synthetic polynucleotide"

SEQ ID NO: 4376 - protein, 450 aa, Artificial Sequence; identical to SEQ ID NO: 4372
  source: /note="Description of Artificial Sequence: Synthetic polypeptide"

SEQ ID NO: 4377 - DNA, 1350 bp, Artificial Sequence; identical to SEQ ID NO: 4339
  source: /note="Description of Artificial Sequence: Synthetic polynucleotide"

SEQ ID NO: 4378 - protein, 450 aa, Artificial Sequence; identical to SEQ ID NO: 4340
  source: /note="Description of Artificial Sequence: Synthetic polypeptide"

SEQ ID NO: 4379 - DNA, 1350 bp, Artificial Sequence; identical to SEQ ID NO: 4339
  source: /note="Description of Artificial Sequence: Synthetic polynucleotide"

SEQ ID NO: 4380 - protein, 450 aa, Artificial Sequence; identical to SEQ ID NO: 4340
  source: /note="Description of Artificial Sequence: Synthetic polypeptide"

SEQ ID NO: 4381 - DNA, 1350 bp, Artificial Sequence
  source: /note="Description of Artificial Sequence: Synthetic polynucleotide"
caggtgcagctggtggagtctgggggaggcgtggtccagcctgggaggtccctgagactctcctgtgcagcatctggattcaccttcagtaactatggcatgcactgggtccgccaggctccaggcgaggggctggagtgggtggcagctatatggtttgatgcaagtgataaatactatgcagacgccgtgaagggccgattcaccatctccagagacaactccaagaacacgctgtatctgcaaatgaacagcctgagagccgaggacacggctgtgtattactgtgcgagagatattgcgatttttggagtggtccccgactactggggccagggaaccctggtcaccgtgtctagtgcctccaccaagggcccatcggtcttccccctggcaccctcctccaagagcacctctgggggcacagcggccctgggctgcctggtcaaggactacttccccgaaccggtgacggtgtcgtggaactcaggcgccctgaccagcggcgtgcacaccttcccggctgtcctacagtcctcaggactctactccctcagcagcgtggtgaccgtgccctccagcagcttgggcacccagacctacatctgcaacgtgaatcacaagcccagcaacaccaaggtggacaagaaagttgagcccaaatcttgtgacaaaactcacacatgcccaccgtgcccagcacctgaactcctggggggaccgtcagtcttcctcttccccccaaaacccaaggacaccctcatgatctcccggacccctgaggtcacatgcgtggtggtggacgtgagccacgaagaccctgaggtcaagttcaactggtacgtggacggcgtggaggtgcataatgccaagacaaagccgtgcgaggagcagtacggcagcacgtaccgttgcgtcagcgtcctcaccgtcctgcaccaggactggctgaatggcaaggagtacaagtgcaaggtgtccaacaaagccctcccagcccccatcgagaaaaccatctccaaagccaaagggcagccccgagaaccacaggtgtacaccctgcccccatcccgggaggagatgaccaagaaccaggtcagcctgacctgcctggtcaaaggcttctatcccagcgacatcgccgtggagtgggagagcaatgggcagccggagaacaactacaagaccacgcctcccgtgctggactccgacggctccttcttcctctatagcaagctcaccgtggacaagagcaggtggcagcaggggaacgtcttctcatgctccgtgatgcatgaggctctgcacaaccactacacgcagaagagcctctccctgtctccgggtaaa

SEQ ID NO: 4382 - protein, 450 aa, Artificial Sequence
  source: /note="Description of Artificial Sequence: Synthetic polypeptide"
QVQLVESGGGVVQPGRSLRLSCAASGFTFSNYGMHWVRQAPGEGLEWVAAIWFDASDKYYADAVKGRFTISRDNSKNTLYLQMNSLRAEDTAVYYCARDIAIFGVVPDYWGQGTLVTVSSASTKGPSVFPLAPSSKSTSGGTAALGCLVKDYFPEPVTVSWNSGALTSGVHTFPAVLQSSGLYSLSSVVTVPSSSLGTQTYICNVNHKPSNTKVDKKVEPKSCDKTHTCPPCPAPELLGGPSVFLFPPKPKDTLMISRTPEVTCVVVDVSHEDPEVKFNWYVDGVEVHNAKTKPCEEQYGSTYRCVSVLTVLHQDWLNGKEYKCKVSNKALPAPIEKTISKAKGQPREPQVYTLPPSREEMTKNQVSLTCLVKGFYPSDIAVEWESNGQPENNYKTTPPVLDSDGSFFLYSKLTVDKSRWQQGNVFSCSVMHEALHNHYTQKSLSLSPGK

SEQ ID NO: 4383 - DNA, 1350 bp, Artificial Sequence; identical to SEQ ID NO: 4381
  source: /note="Description of Artificial Sequence: Synthetic polynucleotide"

SEQ ID NO: 4384 - protein, 450 aa, Artificial Sequence; identical to SEQ ID NO: 4382
  source: /note="Description of Artificial Sequence: Synthetic polypeptide"

SEQ ID NO: 4385 - DNA, 1350 bp, Artificial Sequence; identical to SEQ ID NO: 4339
  source: /note="Description of Artificial Sequence: Synthetic polynucleotide"

SEQ ID NO: 4386 - protein, 450 aa, Artificial Sequence; identical to SEQ ID NO: 4340
  source: /note="Description of Artificial Sequence: Synthetic polypeptide"

SEQ ID NO: 4387 - DNA, 1350 bp, Artificial Sequence; identical to SEQ ID NO: 4339
  source: /note="Description of Artificial Sequence: Synthetic polynucleotide"

SEQ ID NO: 4388 - protein, 450 aa, Artificial Sequence; identical to SEQ ID NO: 4340
  source: /note="Description of Artificial Sequence: Synthetic polypeptide"

SEQ ID NO: 4389 - DNA, 1350 bp, Artificial Sequence; identical to SEQ ID NO: 4339
  source: /note="Description of Artificial Sequence: Synthetic polynucleotide"

SEQ ID NO: 4390 - protein, 450 aa, Artificial Sequence; identical to SEQ ID NO: 4340
  source: /note="Description of Artificial Sequence: Synthetic polypeptide"

SEQ ID NO: 4391 - DNA, 1350 bp, Artificial Sequence; identical to SEQ ID NO: 4339
  source: /note="Description of Artificial Sequence: Synthetic polynucleotide"

SEQ ID NO: 4392 - protein, 450 aa, Artificial Sequence; identical to SEQ ID NO: 4340
  source: /note="Description of Artificial Sequence: Synthetic polypeptide"

SEQ ID NO: 4393 - DNA, 1350 bp, Artificial Sequence; identical to SEQ ID NO: 4339
  source: /note="Description of Artificial Sequence: Synthetic polynucleotide"

SEQ ID NO: 4394 - protein, 450 aa, Artificial Sequence; identical to SEQ ID NO: 4340
  source: /note="Description of Artificial Sequence: Synthetic polypeptide"

SEQ ID NO: 4395 - DNA, 1350 bp, Artificial Sequence; identical to SEQ ID NO: 4339
  source: /note="Description of Artificial Sequence: Synthetic polynucleotide"

SEQ ID NO: 4396 - protein, 450 aa, Artificial Sequence; identical to SEQ ID NO: 4340
  source: /note="Description of Artificial Sequence: Synthetic polypeptide"

SEQ ID NO: 4397 - DNA, 1350 bp, Artificial Sequence; identical to SEQ ID NO: 4339
  source: /note="Description of Artificial Sequence: Synthetic polynucleotide"

SEQ ID NO: 4398 - protein, 450 aa, Artificial Sequence; identical to SEQ ID NO: 4340
  source: /note="Description of Artificial Sequence: Synthetic polypeptide"

SEQ ID NO: 4399 - DNA, 1350 bp, Artificial Sequence; identical to SEQ ID NO: 4339
  source: /note="Description of Artificial Sequence: Synthetic polynucleotide"

SEQ ID NO: 4400 - protein, 450 aa, Artificial Sequence; identical to SEQ ID NO: 4340
  source: /note="Description of Artificial Sequence: Synthetic polypeptide"

SEQ ID NO: 4401 - DNA, 1350 bp, Artificial Sequence; identical to SEQ ID NO: 4339
  source: /note="Description of Artificial Sequence: Synthetic polynucleotide"

SEQ ID NO: 4402 - protein, 450 aa, Artificial Sequence; identical to SEQ ID NO: 4340
  source: /note="Description of Artificial Sequence: Synthetic polypeptide"

SEQ ID NO: 4403 - DNA, 1350 bp, Artificial Sequence
  source: /note="Description of Artificial Sequence: Synthetic polynucleotide"
caggtgcagctggtggagtctgggggaggcgtggtccagcctgggaggtccctgagactctcctgtgcagcatctggattcaccttcagtaactatggcatgcactgggtccgccaggctccaggcgaggggctggagtgggtggcagctatatggtttgatgcaagtgataaatactatgcagacgccgtgaagggccgattcaccatctccagagacaactccaagaacacgctgtatctgcaaatgaacagcctgagagccgaggacacggctgtgtattactgtgcgagagatattgcgatttttggagtgtttcccgactactggggccagggaaccctggtcaccgtgtctagtgcctccaccaagggcccatcggtcttccccctggcaccctcctccaagagcacctctgggggcacagcggccctgggctgcctggtcaaggactacttccccgaaccggtgacggtgtcgtggaactcaggcgccctgaccagcggcgtgcacaccttcccggctgtcctacagtcctcaggactctactccctcagcagcgtggtgaccgtgccctccagcagcttgggcacccagacctacatctgcaacgtgaatcacaagcccagcaacaccaaggtggacaagaaagttgagcccaaatcttgtgacaaaactcacacatgcccaccgtgcccagcacctgaactcctggggggaccgtcagtcttcctcttccccccaaaacccaaggacaccctcatgatctcccggacccctgaggtcacatgcgtggtggtggacgtgagccacgaagaccctgaggtcaagttcaactggtacgtggacggcgtggaggtgcataatgccaagacaaagccgtgcgaggagcagtacggcagcacgtaccgttgcgtcagcgtcctcaccgtcctgcaccaggactggctgaatggcaaggagtacaagtgcaaggtgtccaacaaagccctcccagcccccatcgagaaaaccatctccaaagccaaagggcagccccgagaaccacaggtgtacaccctgcccccatcccgggaggagatgaccaagaaccaggtcagcctgacctgcctggtcaaaggcttctatcccagcgacatcgccgtggagtgggagagcaatgggcagccggagaacaactacaagaccacgcctcccgtgctggactccgacggctccttcttcctctatagcaagctcaccgtggacaagagcaggtggcagcaggggaacgtcttctcatgctccgtgatgcatgaggctctgcacaaccactacacgcagaagagcctctccctgtctccgggtaaa

SEQ ID NO: 4404 - protein, 450 aa, Artificial Sequence
  source: /note="Description of Artificial Sequence: Synthetic polypeptide"
QVQLVESGGGVVQPGRSLRLSCAASGFTFSNYGMHWVRQAPGEGLEWVAAIWFDASDKYYADAVKGRFTISRDNSKNTLYLQMNSLRAEDTAVYYCARDIAIFGVFPDYWGQGTLVTVSSASTKGPSVFPLAPSSKSTSGGTAALGCLVKDYFPEPVTVSWNSGALTSGVHTFPAVLQSSGLYSLSSVVTVPSSSLGTQTYICNVNHKPSNTKVDKKVEPKSCDKTHTCPPCPAPELLGGPSVFLFPPKPKDTLMISRTPEVTCVVVDVSHEDPEVKFNWYVDGVEVHNAKTKPCEEQYGSTYRCVSVLTVLHQDWLNGKEYKCKVSNKALPAPIEKTISKAKGQPREPQVYTLPPSREEMTKNQVSLTCLVKGFYPSDIAVEWESNGQPENNYKTTPPVLDSDGSFFLYSKLTVDKSRWQQGNVFSCSVMHEALHNHYTQKSLSLSPGK

SEQ ID NO: 4405 - DNA, 1350 bp, Artificial Sequence; identical to SEQ ID NO: 4403
  source: /note="Description of Artificial Sequence: Synthetic polynucleotide"

SEQ ID NO: 4406 - protein, 450 aa, Artificial Sequence; identical to SEQ ID NO: 4404
  source: /note="Description of Artificial Sequence: Synthetic polypeptide"

SEQ ID NO: 4407 - DNA, 1350 bp, Artificial Sequence; identical to SEQ ID NO: 4381
  source: /note="Description of Artificial Sequence: Synthetic polynucleotide"

SEQ ID NO: 4408 - protein, 450 aa, Artificial Sequence; identical to SEQ ID NO: 4382
  source: /note="Description of Artificial Sequence: Synthetic polypeptide"

SEQ ID NO: 4409 - DNA, 1350 bp, Artificial Sequence; identical to SEQ ID NO: 4381
  source: /note="Description of Artificial Sequence: Synthetic polynucleotide"

SEQ ID NO: 4410 - protein, 450 aa, Artificial Sequence; identical to SEQ ID NO: 4382
  source: /note="Description of Artificial Sequence: Synthetic polypeptide"

SEQ ID NO: 4411 - DNA, 1350 bp, Artificial Sequence; identical to SEQ ID NO: 4403
  source: /note="Description of Artificial Sequence: Synthetic polynucleotide"

SEQ ID NO: 4412 - protein, 450 aa, Artificial Sequence; identical to SEQ ID NO: 4404
  source: /note="Description of Artificial Sequence: Synthetic polypeptide"

SEQ ID NO: 4413 - DNA, 1350 bp, Artificial Sequence; identical to SEQ ID NO: 4403
  source: /note="Description of Artificial Sequence: Synthetic polynucleotide"

SEQ ID NO: 4414 - protein, 450 aa, Artificial Sequence; identical to SEQ ID NO: 4404
  source: /note="Description of Artificial Sequence: Synthetic polypeptide"

SEQ ID NO: 4415 - DNA, 1350 bp, Artificial Sequence; identical to SEQ ID NO: 4403
  source: /note="Description of Artificial Sequence: Synthetic polynucleotide"

SEQ ID NO: 4416 - protein, 450 aa, Artificial Sequence; identical to SEQ ID NO: 4404
  source: /note="Description of Artificial Sequence: Synthetic polypeptide"

SEQ ID NO: 4417 - DNA, 1350 bp, Artificial Sequence
  source: /note="Description of Artificial Sequence: Synthetic polynucleotide"
caggtgcagctggtggagtctgggggaggcgtggtccagcctgggaggtccctgagactctcctgtgcagcatctggattcaccttcagtaactatggcatgcactgggtccgccaggctccaggcgaggggctggagtgggtggcagctatatggtttgatgcaagtgataaatactatgcagacgccgtgaagggccgattcaccatctccagagacaactccaagaacacgctgtatctgcaaatgaacagcctgagagccgaggacacggctgtgtattactgtgcgagagatattgcgatttttggagtgatccccgactactggggccagggaaccctggtcaccgtgtctagtgcctccaccaagggcccatcggtcttccccctggcaccctcctccaagagcacctctgggggcacagcggccctgggctgcctggtcaaggactacttccccgaaccggtgacggtgtcgtggaactcaggcgccctgaccagcggcgtgcacaccttcccggctgtcctacagtcctcaggactctactccctcagcagcgtggtgaccgtgccctccagcagcttgggcacccagacctacatctgcaacgtgaatcacaagcccagcaacaccaaggtggacaagaaagttgagcccaaatcttgtgacaaaactcacacatgcccaccgtgcccagcacctgaactcctggggggaccgtcagtcttcctcttccccccaaaacccaaggacaccctcatgatctcccggacccctgaggtcacatgcgtggtggtggacgtgagccacgaagaccctgaggtcaagttcaactggtacgtggacggcgtggaggtgcataatgccaagacaaagccgtgcgaggagcagtacggcagcacgtaccgttgcgtcagcgtcctcaccgtcctgcaccaggactggctgaatggcaaggagtacaagtgcaaggtgtccaacaaagccctcccagcccccatcgagaaaaccatctccaaagccaaagggcagccccgagaaccacaggtgtacaccctgcccccatcccgggaggagatgaccaagaaccaggtcagcctgacctgcctggtcaaaggcttctatcccagcgacatcgccgtggagtgggagagcaatgggcagccggagaacaactacaagaccacgcctcccgtgctggactccgacggctccttcttcctctatagcaagctcaccgtggacaagagcaggtggcagcaggggaacgtcttctcatgctccgtgatgcatgaggctctgcacaaccactacacgcagaagagcctctccctgtctccgggtaaa

SEQ ID NO: 4418 - protein, 450 aa, Artificial Sequence
  source: /note="Description of Artificial Sequence: Synthetic polypeptide"
QVQLVESGGGVVQPGRSLRLSCAASGFTFSNYGMHWVRQAPGEGLEWVAAIWFDASDKYYADAVKGRFTISRDNSKNTLYLQMNSLRAEDTAVYYCARDIAIFGVIPDYWGQGTLVTVSSASTKGPSVFPLAPSSKSTSGGTAALGCLVKDYFPEPVTVSWNSGALTSGVHTFPAVLQSSGLYSLSSVVTVPSSSLGTQTYICNVNHKPSNTKVDKKVEPKSCDKTHTCPPCPAPELLGGPSVFLFPPKPKDTLMISRTPEVTCVVVDVSHEDPEVKFNWYVDGVEVHNAKTKPCEEQYGSTYRCVSVLTVLHQDWLNGKEYKCKVSNKALPAPIEKTISKAKGQPREPQVYTLPPSREEMTKNQVSLTCLVKGFYPSDIAVEWESNGQPENNYKTTPPVLDSDGSFFLYSKLTVDKSRWQQGNVFSCSVMHEALHNHYTQKSLSLSPGK

SEQ ID NO: 4419 - DNA, 1350 bp, Artificial Sequence; identical to SEQ ID NO: 4417
  source: /note="Description of Artificial Sequence: Synthetic polynucleotide"

SEQ ID NO: 4420 - protein, 450 aa, Artificial Sequence; identical to SEQ ID NO: 4418
  source: /note="Description of Artificial Sequence: Synthetic polypeptide"

SEQ ID NO: 4421 - DNA, 1350 bp, Artificial Sequence; identical to SEQ ID NO: 4339
  source: /note="Description of Artificial Sequence: Synthetic polynucleotide"

SEQ ID NO: 4422 - protein, 450 aa, Artificial Sequence; identical to SEQ ID NO: 4340
  source: /note="Description of Artificial Sequence: Synthetic polypeptide"

SEQ ID NO: 4423 - DNA, 1350 bp, Artificial Sequence
  source: /note="Description of Artificial Sequence: Synthetic polynucleotide"
caggtgcagctggtggagtctgggggaggcgtggtccagcctgggaggtccctgagactctcctgtgcagcatctggattcaccttcagtaactatggcatgcactgggtccgccaggctccaggcgaggggctggagtgggtggcagctatatggtttgatgcaagtgataaatactatgcagacgccgtgaagggccgattcaccatctccagagacaactccaagaacacgctgtatctgcaaatgaacagcctgagagccgaggacacggctgtgtattactgtgcgagagatcaggcgatttttggagtggtccccgattactggggccagggaaccctggtcaccgtgtctagtgcctccaccaagggcccatcggtcttccccctggcaccctcctccaagagcacctctgggggcacagcggccctgggctgcctggtcaaggactacttccccgaaccggtgacggtgtcgtggaactcaggcgccctgaccagcggcgtgcacaccttcccggctgtcctacagtcctcaggactctactccctcagcagcgtggtgaccgtgccctccagcagcttgggcacccagacctacatctgcaacgtgaatcacaagcccagcaacaccaaggtggacaagaaagttgagcccaaatcttgtgacaaaactcacacatgcccaccgtgcccagcacctgaactcctggggggaccgtcagtcttcctcttccccccaaaacccaaggacaccctcatgatctcccggacccctgaggtcacatgcgtggtggtggacgtgagccacgaagaccctgaggtcaagttcaactggtacgtggacggcgtggaggtgcataatgccaagacaaagccgtgcgaggagcagtacggcagcacgtaccgttgcgtcagcgtcctcaccgtcctgcaccaggactggctgaatggcaaggagtacaagtgcaaggtgtccaacaaagccctcccagcccccatcgagaaaaccatctccaaagccaaagggcagccccgagaaccacaggtgtacaccctgcccccatcccgggaggagatgaccaagaaccaggtcagcctgacctgcctggtcaaaggcttctatcccagcgacatcgccgtggagtgggagagcaatgggcagccggagaacaactacaagaccacgcctcccgtgctggactccgacggctccttcttcctctatagcaagctcaccgtggacaagagcaggtggcagcaggggaacgtcttctcatgctccgtgatgcatgaggctctgcacaaccactacacgcagaagagcctctccctgtctccgggtaaa

SEQ ID NO: 4424 - protein, 450 aa, Artificial Sequence; identical to SEQ ID NO: 542
  source: /note="Description of Artificial Sequence: Synthetic polypeptide"

SEQ ID NO: 4425 - DNA, 1350 bp, Artificial Sequence; identical to SEQ ID NO: 4381
  source: /note="Description of Artificial Sequence: Synthetic polynucleotide"

SEQ ID NO: 4426 - protein, 450 aa, Artificial Sequence; identical to SEQ ID NO: 4382
  source: /note="Description of Artificial Sequence: Synthetic polypeptide"

SEQ ID NO: 4427 - DNA, 1350 bp, Artificial Sequence; identical to SEQ ID NO: 4339
  source: /note="Description of Artificial Sequence: Synthetic polynucleotide"

SEQ ID NO: 4428 - protein, 450 aa, Artificial Sequence; identical to SEQ ID NO: 4340
  source: /note="Description of Artificial Sequence: Synthetic polypeptide"

SEQ ID NO: 4429 - DNA, 1350 bp, Artificial Sequence; identical to SEQ ID NO: 4423
  source: /note="Description of Artificial Sequence: Synthetic polynucleotide"

SEQ ID NO: 4430 - protein, 450 aa, Artificial Sequence; identical to SEQ ID NO: 542
  source: /note="Description of Artificial Sequence: Synthetic polypeptide"

SEQ ID NO: 4431 - DNA, 1350 bp, Artificial Sequence; identical to SEQ ID NO: 4339
  source: /note="Description of Artificial Sequence: Synthetic polynucleotide"

SEQ ID NO: 4432 - protein, 450 aa, Artificial Sequence; identical to SEQ ID NO: 4340
  source: /note="Description of Artificial Sequence: Synthetic polypeptide"

SEQ ID NO: 4433 - DNA, 1350 bp, Artificial Sequence; identical to SEQ ID NO: 4339
  source: /note="Description of Artificial Sequence: Synthetic polynucleotide"

SEQ ID NO: 4434 - protein, 450 aa, Artificial Sequence; identical to SEQ ID NO: 4340
  source: /note="Description of Artificial Sequence: Synthetic polypeptide"

SEQ ID NO: 4435 - DNA, 1350 bp, Artificial Sequence; identical to SEQ ID NO: 4381
  source: /note="Description of Artificial Sequence: Synthetic polynucleotide"

SEQ ID NO: 4436 - protein, 450 aa, Artificial Sequence; identical to SEQ ID NO: 4382
  source: /note="Description of Artificial Sequence: Synthetic polypeptide"

SEQ ID NO: 4437 - DNA, 1350 bp, Artificial Sequence; identical to SEQ ID NO: 4339
  source: /note="Description of Artificial Sequence: Synthetic polynucleotide"

SEQ ID NO: 4438 - protein, 450 aa, Artificial Sequence; identical to SEQ ID NO: 4340
  source: /note="Description of Artificial Sequence: Synthetic polypeptide"

SEQ ID NO: 4439 - DNA, 1350 bp, Artificial Sequence; identical to SEQ ID NO: 4381
  source: /note="Description of Artificial Sequence: Synthetic polynucleotide"

SEQ ID NO: 4440 - protein, 450 aa, Artificial Sequence; identical to SEQ ID NO: 4382
  source: /note="Description of Artificial Sequence: Synthetic polypeptide"

SEQ ID NO: 4441 - DNA, 1350 bp, Artificial Sequence
  source: /note="Description of Artificial Sequence: Synthetic polynucleotide"
caggtgcagctggtggagtctgggggaggcgtggtccagcctgggaggtccctgagactctcctgtgcagcatctggattcaccttccagaactatggcatgcactgggtccgccaggctccaggcgaggggctggagtgggtggcagctatatggtttgatgcgtacggtaaatactatgcagacgccgtgaagggccgattcaccatctccagagacaactccaagaacacgctgtatctgcaaatgaacagcctgagagccgaggacacggctgtgtattactgtgcgagagatcagacgatttttggagtggtccccgactactggggccagggaaccctggtcaccgtgtctagtgcctccaccaagggcccatcggtcttccccctggcaccctcctccaagagcacctctgggggcacagcggccctgggctgcctggtcaaggactacttccccgaaccggtgacggtgtcgtggaactcaggcgccctgaccagcggcgtgcacaccttcccggctgtcctacagtcctcaggactctactccctcagcagcgtggtgaccgtgccctccagcagcttgggcacccagacctacatctgcaacgtgaatcacaagcccagcaacaccaaggtggacaagaaagttgagcccaaatcttgtgacaaaactcacacatgcccaccgtgcccagcacctgaactcctggggggaccgtcagtcttcctcttccccccaaaacccaaggacaccctcatgatctcccggacccctgaggtcacatgcgtggtggtggacgtgagccacgaagaccctgaggtcaagttcaactggtacgtggacggcgtggaggtgcataatgccaagacaaagccgtgcgaggagcagtacggcagcacgtaccgttgcgtcagcgtcctcaccgtcctgcaccaggactggctgaatggcaaggagtacaagtgcaaggtgtccaacaaagccctcccagcccccatcgagaaaaccatctccaaagccaaagggcagccccgagaaccacaggtgtacaccctgcccccatcccgggaggagatgaccaagaaccaggtcagcctgacctgcctggtcaaaggcttctatcccagcgacatcgccgtggagtgggagagcaatgggcagccggagaacaactacaagaccacgcctcccgtgctggactccgacggctccttcttcctctatagcaagctcaccgtggacaagagcaggtggcagcaggggaacgtcttctcatgctccgtgatgcatgaggctctgcacaaccactacacgcagaagagcctctccctgtctccgggtaaa

SEQ ID NO: 4442 - protein, 450 aa, Artificial Sequence
  source: /note="Description of Artificial Sequence: Synthetic polypeptide"
QVQLVESGGGVVQPGRSLRLSCAASGFTFQNYGMHWVRQAPGEGLEWVAAIWFDAYGKYYADAVKGRFTISRDNSKNTLYLQMNSLRAEDTAVYYCARDQTIFGVVPDYWGQGTLVTVSSASTKGPSVFPLAPSSKSTSGGTAALGCLVKDYFPEPVTVSWNSGALTSGVHTFPAVLQSSGLYSLSSVVTVPSSSLGTQTYICNVNHKPSNTKVDKKVEPKSCDKTHTCPPCPAPELLGGPSVFLFPPKPKDTLMISRTPEVTCVVVDVSHEDPEVKFNWYVDGVEVHNAKTKPCEEQYGSTYRCVSVLTVLHQDWLNGKEYKCKVSNKALPAPIEKTISKAKGQPREPQVYTLPPSREEMTKNQVSLTCLVKGFYPSDIAVEWESNGQPENNYKTTPPVLDSDGSFFLYSKLTVDKSRWQQGNVFSCSVMHEALHNHYTQKSLSLSPGK

SEQ ID NO: 4443 - DNA, 1350 bp, Artificial Sequence; identical to SEQ ID NO: 4441
  source: /note="Description of Artificial Sequence: Synthetic polynucleotide"

SEQ ID NO: 4444 - protein, 450 aa, Artificial Sequence; identical to SEQ ID NO: 4442
  source: /note="Description of Artificial Sequence: Synthetic polypeptide"

SEQ ID NO: 4445 - DNA, 1350 bp, Artificial Sequence
  source: /note="Description of Artificial Sequence: Synthetic polynucleotide"
caggtgcagctggtggagtctgggggaggcgtggtccagcctgggaggtccctgagactctcctgtgcagcatctggattcaccttccagaactatggcatgcactgggtccgccaggctccaggcgaggggctggagtgggtggcagctatatggtttgatgcgtacggtaaatactatgcagacgccgtgaagggccgattcaccatctccagagacaactccaagaacacgctgtatctgcaaatgaacagcctgagagccgaggacacggctgtgtattactgtgcgagagataagacgatttttggagtggtccccgactactggggccagggaaccctggtcaccgtgtctagtgcctccaccaagggcccatcggtcttccccctggcaccctcctccaagagcacctctgggggcacagcggccctgggctgcctggtcaaggactacttccccgaaccggtgacggtgtcgtggaactcaggcgccctgaccagcggcgtgcacaccttcccggctgtcctacagtcctcaggactctactccctcagcagcgtggtgaccgtgccctccagcagcttgggcacccagacctacatctgcaacgtgaatcacaagcccagcaacaccaaggtggacaagaaagttgagcccaaatcttgtgacaaaactcacacatgcccaccgtgcccagcacctgaactcctggggggaccgtcagtcttcctcttccccccaaaacccaaggacaccctcatgatctcccggacccctgaggtcacatgcgtggtggtggacgtgagccacgaagaccctgaggtcaagttcaactggtacgtggacggcgtggaggtgcataatgccaagacaaagccgtgcgaggagcagtacggcagcacgtaccgttgcgtcagcgtcctcaccgtcctgcaccaggactggctgaatggcaaggagtacaagtgcaaggtgtccaacaaagccctcccagcccccatcgagaaaaccatctccaaagccaaagggcagccccgagaaccacaggtgtacaccctgcccccatcccgggaggagatgaccaagaaccaggtcagcctgacctgcctggtcaaaggcttctatcccagcgacatcgccgtggagtgggagagcaatgggcagccggagaacaactacaagaccacgcctcccgtgctggactccgacggctccttcttcctctatagcaagctcaccgtggacaagagcaggtggcagcaggggaacgtcttctcatgctccgtgatgcatgaggctctgcacaaccactacacgcagaagagcctctccctgtctccgggtaaa

SEQ ID NO: 4446 - protein, 450 aa, Artificial Sequence
  source: /note="Description of Artificial Sequence: Synthetic polypeptide"
QVQLVESGGGVVQPGRSLRLSCAASGFTFQNYGMHWVRQAPGEGLEWVAAIWFDAYGKYYADAVKGRFTISRDNSKNTLYLQMNSLRAEDTAVYYCARDKTIFGVVPDYWGQGTLVTVSSASTKGPSVFPLAPSSKSTSGGTAALGCLVKDYFPEPVTVSWNSGALTSGVHTFPAVLQSSGLYSLSSVVTVPSSSLGTQTYICNVNHKPSNTKVDKKVEPKSCDKTHTCPPCPAPELLGGPSVFLFPPKPKDTLMISRTPEVTCVVVDVSHEDPEVKFNWYVDGVEVHNAKTKPCEEQYGSTYRCVSVLTVLHQDWLNGKEYKCKVSNKALPAPIEKTISKAKGQPREPQVYTLPPSREEMTKNQVSLTCLVKGFYPSDIAVEWESNGQPENNYKTTPPVLDSDGSFFLYSKLTVDKSRWQQGNVFSCSVMHEALHNHYTQKSLSLSPGK

SEQ ID NO: 4447 - DNA, 1350 bp, Artificial Sequence; identical to SEQ ID NO: 4445
  source: /note="Description of Artificial Sequence: Synthetic polynucleotide"

SEQ ID NO: 4448 - protein, 450 aa, Artificial Sequence; identical to SEQ ID NO: 4446
  source: /note="Description of Artificial Sequence: Synthetic polypeptide"

SEQ ID NO: 4449 - DNA, 1350 bp, Artificial Sequence
  source: /note="Description of Artificial Sequence: Synthetic polynucleotide"
caggtgcagctggtggagtctgggggaggcgtggtccagcctgggaggtccctgagactctcctgtgcagcatctggattcaccttcagtaactatggcatgcactgggtccgccaggctccaggcgaggggctggagtgggtggcagctatatggtttgatgcgtacggtaaatactatgcagacgccgtgaagggccgattcaccatctccagagacaactccaagaacacgctgtatctgcaaatgaacagcctgagagccgaggacacggctgtgtattactgtgcgagagataagacgatttttggagtggtccccgactactggggccagggaaccctggtcaccgtgtctagtgcctccaccaagggcccatcggtcttccccctggcaccctcctccaagagcacctctgggggcacagcggccctgggctgcctggtcaaggactacttccccgaaccggtgacggtgtcgtggaactcaggcgccctgaccagcggcgtgcacaccttcccggctgtcctacagtcctcaggactctactccctcagcagcgtggtgaccgtgccctccagcagcttgggcacccagacctacatctgcaacgtgaatcacaagcccagcaacaccaaggtggacaagaaagttgagcccaaatcttgtgacaaaactcacacatgcccaccgtgcccagcacctgaactcctggggggaccgtcagtcttcctcttccccccaaaacccaaggacaccctcatgatctcccggacccctgaggtcacatgcgtggtggtggacgtgagccacgaagaccctgaggtcaagttcaactggtacgtggacggcgtggaggtgcataatgccaagacaaagccgtgcgaggagcagtacggcagcacgtaccgttgcgtcagcgtcctcaccgtcctgcaccaggactggctgaatggcaaggagtacaagtgcaaggtgtccaacaaagccctcccagcccccatcgagaaaaccatctccaaagccaaagggcagccccgagaaccacaggtgtacaccctgcccccatcccgggaggagatgaccaagaaccaggtcagcctgacctgcctggtcaaaggcttctatcccagcgacatcgccgtggagtgggagagcaatgggcagccggagaacaactacaagaccacgcctcccgtgctggactccgacggctccttcttcctctatagcaagctcaccgtggacaagagcaggtggcagcaggggaacgtcttctcatgctccgtgatgcatgaggctctgcacaaccactacacgcagaagagcctctccctgtctccgggtaaa

SEQ ID NO: 4450 - protein, 450 aa, Artificial Sequence
  source: /note="Description of Artificial Sequence: Synthetic polypeptide"
QVQLVESGGGVVQPGRSLRLSCAASGFTFSNYGMHWVRQAPGEGLEWVAAIWFDAYGKYYADAVKGRFTISRDNSKNTLYLQMNSLRAEDTAVYYCARDKTIFGVVPDYWGQGTLVTVSSASTKGPSVFPLAPSSKSTSGGTAALGCLVKDYFPEPVTVSWNSGALTSGVHTFPAVLQSSGLYSLSSVVTVPSSSLGTQTYICNVNHKPSNTKVDKKVEPKSCDKTHTCPPCPAPELLGGPSVFLFPPKPKDTLMISRTPEVTCVVVDVSHEDPEVKFNWYVDGVEVHNAKTKPCEEQYGSTYRCVSVLTVLHQDWLNGKEYKCKVSNKALPAPIEKTISKAKGQPREPQVYTLPPSREEMTKNQVSLTCLVKGFYPSDIAVEWESNGQPENNYKTTPPVLDSDGSFFLYSKLTVDKSRWQQGNVFSCSVMHEALHNHYTQKSLSLSPGK

SEQ ID NO: 4451 - DNA, 1350 bp, Artificial Sequence
  source: /note="Description of Artificial Sequence: Synthetic polynucleotide"
caggtgcagctggtggagtctgggggaggcgtggtccagcctgggaggtccctgagactctcctgtgcagcatctggattcaccttccagaactatggcatgcactgggtccgccaggctccaggcgaggggctggagtgggtggcagctatatggtttgatgcgtacgacaaatactatgcagacgccgtgaagggccgattcaccatctccagagacaactccaagaacacgctgtatctgcaaatgaacagcctgagagccgaggacacggctgtgtattactgtgcgagagataagtcgatttttggagtggtccccgactactggggccagggaaccctggtcaccgtgtctagtgcctccaccaagggcccatcggtcttccccctggcaccctcctccaagagcacctctgggggcacagcggccctgggctgcctggtcaaggactacttccccgaaccggtgacggtgtcgtggaactcaggcgccctgaccagcggcgtgcacaccttcccggctgtcctacagtcctcaggactctactccctcagcagcgtggtgaccgtgccctccagcagcttgggcacccagacctacatctgcaacgtgaatcacaagcccagcaacaccaaggtggacaagaaagttgagcccaaatcttgtgacaaaactcacacatgcccaccgtgcccagcacctgaactcctggggggaccgtcagtcttcctcttccccccaaaacccaaggacaccctcatgatctcccggacccctgaggtcacatgcgtggtggtggacgtgagccacgaagaccctgaggtcaagttcaactggtacgtggacggcgtggaggtgcataatgccaagacaaagccgtgcgaggagcagtacggcagcacgtaccgttgcgtcagcgtcctcaccgtcctgcaccaggactggctgaatggcaaggagtacaagtgcaaggtgtccaacaaagccctcccagcccccatcgagaaaaccatctccaaagccaaagggcagccccgagaaccacaggtgtacaccctgcccccatcccgggaggagatgaccaagaaccaggtcagcctgacctgcctggtcaaaggcttctatcccagcgacatcgccgtggagtgggagagcaatgggcagccggagaacaactacaagaccacgcctcccgtgctggactccgacggctccttcttcctctatagcaagctcaccgtggacaagagcaggtggcagcaggggaacgtcttctcatgctccgtgatgcatgaggctctgcacaaccactacacgcagaagagcctctccctgtctccgggtaaa

SEQ ID NO: 4452 - protein, 450 aa, Artificial Sequence
  source: /note="Description of Artificial Sequence: Synthetic polypeptide"
QVQLVESGGGVVQPGRSLRLSCAASGFTFQNYGMHWVRQAPGEGLEWVAAIWFDAYDKYYADAVKGRFTISRDNSKNTLYLQMNSLRAEDTAVYYCARDKSIFGVVPDYWGQGTLVTVSSASTKGPSVFPLAPSSKSTSGGTAALGCLVKDYFPEPVTVSWNSGALTSGVHTFPAVLQSSGLYSLSSVVTVPSSSLGTQTYICNVNHKPSNTKVDKKVEPKSCDKTHTCPPCPAPELLGGPSVFLFPPKPKDTLMISRTPEVTCVVVDVSHEDPEVKFNWYVDGVEVHNAKTKPCEEQYGSTYRCVSVLTVLHQDWLNGKEYKCKVSNKALPAPIEKTISKAKGQPREPQVYTLPPSREEMTKNQVSLTCLVKGFYPSDIAVEWESNGQPENNYKTTPPVLDSDGSFFLYSKLTVDKSRWQQGNVFSCSVMHEALHNHYTQKSLSLSPGK

SEQ ID NO: 4453 - DNA, 1350 bp, Artificial Sequence; identical to SEQ ID NO: 4451
  source: /note="Description of Artificial Sequence: Synthetic polynucleotide"

SEQ ID NO: 4454 - protein, 450 aa, Artificial Sequence; identical to SEQ ID NO: 4452
  source: /note="Description of Artificial Sequence: Synthetic polypeptide"

SEQ ID NO: 4455 - DNA, 1350 bp, Artificial Sequence
  source: /note="Description of Artificial Sequence: Synthetic polynucleotide"
caggtgcagctggtggagtctgggggaggcgtggtccagcctgggaggtccctgagactctcctgtgcagcatctggattcaccttccagaactatggcatgcactgggtccgccaggctccaggcgaggggctggagtgggtggcagctatatggtttgatgcgtacgacaaatactatgcagacgccgtgaagggccgattcaccatctccagagacaactccaagaacacgctgtatctgcaaatgaacagcctgagagccgaggacacggctgtgtattactgtgcgagagatctcgcgatttttggagtggtccccgactactggggccagggaaccctggtcaccgtgtctagtgcctccaccaagggcccatcggtcttccccctggcaccctcctccaagagcacctctgggggcacagcggccctgggctgcctggtcaaggactacttccccgaaccggtgacggtgtcgtggaactcaggcgccctgaccagcggcgtgcacaccttcccggctgtcctacagtcctcaggactctactccctcagcagcgtggtgaccgtgccctccagcagcttgggcacccagacctacatctgcaacgtgaatcacaagcccagcaacaccaaggtggacaagaaagttgagcccaaatcttgtgacaaaactcacacatgcccaccgtgcccagcacctgaactcctggggggaccgtcagtcttcctcttccccccaaaacccaaggacaccctcatgatctcccggacccctgaggtcacatgcgtggtggtggacgtgagccacgaagaccctgaggtcaagttcaactggtacgtggacggcgtggaggtgcataatgccaagacaaagccgtgcgaggagcagtacggcagcacgtaccgttgcgtcagcgtcctcaccgtcctgcaccaggactggctgaatggcaaggagtacaagtgcaaggtgtccaacaaagccctcccagcccccatcgagaaaaccatctccaaagccaaagggcagccccgagaaccacaggtgtacaccctgcccccatcccgggaggagatgaccaagaaccaggtcagcctgacctgcctggtcaaaggcttctatcccagcgacatcgccgtggagtgggagagcaatgggcagccggagaacaactacaagaccacgcctcccgtgctggactccgacggctccttcttcctctatagcaagctcaccgtggacaagagcaggtggcagcaggggaacgtcttctcatgctccgtgatgcatgaggctctgcacaaccactacacgcagaagagcctctccctgtctccgggtaaa

SEQ ID NO: 4456 - protein, 450 aa, Artificial Sequence
  source: /note="Description of Artificial Sequence: Synthetic polypeptide"
QVQLVESGGGVVQPGRSLRLSCAASGFTFQNYGMHWVRQAPGEGLEWVAAIWFDAYDKYYADAVKGRFTISRDNSKNTLYLQMNSLRAEDTAVYYCARDLAIFGVVPDYWGQGTLVTVSSASTKGPSVFPLAPSSKSTSGGTAALGCLVKDYFPEPVTVSWNSGALTSGVHTFPAVLQSSGLYSLSSVVTVPSSSLGTQTYICNVNHKPSNTKVDKKVEPKSCDKTHTCPPCPAPELLGGPSVFLFPPKPKDTLMISRTPEVTCVVVDVSHEDPEVKFNWYVDGVEVHNAKTKPCEEQYGSTYRCVSVLTVLHQDWLNGKEYKCKVSNKALPAPIEKTISKAKGQPREPQVYTLPPSREEMTKNQVSLTCLVKGFYPSDIAVEWESNGQPENNYKTTPPVLDSDGSFFLYSKLTVDKSRWQQGNVFSCSVMHEALHNHYTQKSLSLSPGK

SEQ ID NO: 4457 - DNA, 1350 bp, Artificial Sequence
  source: /note="Description of Artificial Sequence: Synthetic polynucleotide"
caggtgcagctggtggagtctgggggaggcgtggtccagcctgggaggtccctgagactctcctgtgcagcatctggattcaccttccagaactatggcatgcactgggtccgccaggctccaggcgaggggctggagtgggtggcagctatatggtttgatgcggctttcaaatactatgcagacgccgtgaagggccgattcaccatctccagagacaactccaagaacacgctgtatctgcaaatgaacagcctgagagccgaggacacggctgtgtattactgtgcgagagatctcgcgatttttggagtggtccccgactactggggccagggaaccctggtcaccgtgtctagtgcctccaccaagggcccatcggtcttccccctggcaccctcctccaagagcacctctgggggcacagcggccctgggctgcctggtcaaggactacttccccgaaccggtgacggtgtcgtggaactcaggcgccctgaccagcggcgtgcacaccttcccggctgtcctacagtcctcaggactctactccctcagcagcgtggtgaccgtgccctccagcagcttgggcacccagacctacatctgcaacgtgaatcacaagcccagcaacaccaaggtggacaagaaagttgagcccaaatcttgtgacaaaactcacacatgcccaccgtgcccagcacctgaactcctggggggaccgtcagtcttcctcttccccccaaaacccaaggacaccctcatgatctcccggacccctgaggtcacatgcgtggtggtggacgtgagccacgaagaccctgaggtcaagttcaactggtacgtggacggcgtggaggtgcataatgccaagacaaagccgtgcgaggagcagtacggcagcacgtaccgttgcgtcagcgtcctcaccgtcctgcaccaggactggctgaatggcaaggagtacaagtgcaaggtgtccaacaaagccctcccagcccccatcgagaaaaccatctccaaagccaaagggcagccccgagaaccacaggtgtacaccctgcccccatcccgggaggagatgaccaagaaccaggtcagcctgacctgcctggtcaaaggcttctatcccagcgacatcgccgtggagtgggagagcaatgggcagccggagaacaactacaagaccacgcctcccgtgctggactccgacggctccttcttcctctatagcaagctcaccgtggacaagagcaggtggcagcaggggaacgtcttctcatgctccgtgatgcatgaggctctgcacaaccactacacgcagaagagcctctccctgtctccgggtaaa

SEQ ID NO: 4458 - protein, 450 aa, Artificial Sequence
  source: /note="Description of Artificial Sequence: Synthetic polypeptide"
QVQLVESGGGVVQPGRSLRLSCAASGFTFQNYGMHWVRQAPGEGLEWVAAIWFDAAFKYYADAVKGRFTISRDNSKNTLYLQMNSLRAEDTAVYYCARDLAIFGVVPDYWGQGTLVTVSSASTKGPSVFPLAPSSKSTSGGTAALGCLVKDYFPEPVTVSWNSGALTSGVHTFPAVLQSSGLYSLSSVVTVPSSSLGTQTYICNVNHKPSNTKVDKKVEPKSCDKTHTCPPCPAPELLGGPSVFLFPPKPKDTLMISRTPEVTCVVVDVSHEDPEVKFNWYVDGVEVHNAKTKPCEEQYGSTYRCVSVLTVLHQDWLNGKEYKCKVSNKALPAPIEKTISKAKGQPREPQVYTLPPSREEMTKNQVSLTCLVKGFYPSDIAVEWESNGQPENNYKTTPPVLDSDGSFFLYSKLTVDKSRWQQGNVFSCSVMHEALHNHYTQKSLSLSPGK

SEQ ID NO: 4459 - DNA, 1416 bp, Artificial Sequence
  source: /note="Description of Artificial Sequence: Synthetic polynucleotide"
atggacatgagggtgcccgctcagctcctggggctcctgctgctgtggctgagaggtgcgcgctgtcaggtgcagctggtggagtctgggggaggcgtggtccagcctgggaggtccctgagactctcctgtgcagcatctggattcaccttcagtaactatggcatgcactgggtccgccaggctccaggcgaggggctggagtgggtggcagctatctggtttgatgcaagtgataaatactatgcagacgccgtgaagggccgattcaccatctccagagacaactccaagaacacgctgtatctgcaaatgaacagcctgagagccgaggacacggctgtgtattactgtgcgagagatctggcgatttttggagtgattcccgactactggggccagggaaccctggtcaccgtgtctagtgcctccaccaagggcccatcggtcttccccctggcaccctcctccaagagcacctctgggggcacagcggccctgggctgcctggtcaaggactacttccccgaaccggtgacggtgtcgtggaactcaggcgccctgaccagcggcgtgcacaccttcccggctgtcctacagtcctcaggactctactccctcagcagcgtggtgaccgtgccctccagcagcttgggcacccagacctacatctgcaacgtgaatcacaagcccagcaacaccaaggtggacaagaaagttgagcccaaatcttgtgacaaaactcacacatgcccaccgtgcccagcacctgaactcctggggggaccgtcagtcttcctcttccccccaaaacccaaggacaccctctacatcacccgggagcctgaggtcacatgcgtggtggtggacgtgagccacgaagaccctgaggtcaagttcaactggtacgtggacggcgtggaggtgcataatgccaagacaaagccgtgcgaggagcagtacggcagcacgtaccgttgcgtcagcgtcctcaccgtcctgcaccaggactggctgaatggcaaggagtacaagtgcaaggtgtccaacaaagccctcccagcccccatcgagaaaaccatctccaaagccaaagggcagccccgagaaccacaggtgtacaccctgcccccatcccgggaggagatgaccaagaaccaggtcagcctgacctgcctggtcaaaggcttctatcccagcgatatcgccgtggagtgggagagcaatgggcagccggagaacaactacaagaccacgcctcccgtgctggactccgacggctccttcttcctctatagcaagctcaccgtggacaagagtaggtggcagcaggggaacgtcttctcatgctccgtgatgcatgaggctctgcacaaccactacacgcagaagagcctctccctgtctccgggtaaa

SEQ ID NO: 4460 - protein, 450 aa, Artificial Sequence
  source: /note="Description of Artificial Sequence: Synthetic polypeptide"
QVQLVESGGGVVQPGRSLRLSCAASGFTFSNYGMHWVRQAPGEGLEWVAAIWFDASDKYYADAVKGRFTISRDNSKNTLYLQMNSLRAEDTAVYYCARDLAIFGVIPDYWGQGTLVTVSSASTKGPSVFPLAPSSKSTSGGTAALGCLVKDYFPEPVTVSWNSGALTSGVHTFPAVLQSSGLYSLSSVVTVPSSSLGTQTYICNVNHKPSNTKVDKKVEPKSCDKTHTCPPCPAPELLGGPSVFLFPPKPKDTLYITREPEVTCVVVDVSHEDPEVKFNWYVDGVEVHNAKTKPCEEQYGSTYRCVSVLTVLHQDWLNGKEYKCKVSNKALPAPIEKTISKAKGQPREPQVYTLPPSREEMTKNQVSLTCLVKGFYPSDIAVEWESNGQPENNYKTTPPVLDSDGSFFLYSKLTVDKSRWQQGNVFSCSVMHEALHNHYTQKSLSLSPGK

SEQ ID NO: 4461 - DNA, 1416 bp, Artificial Sequence
  source: /note="Description of Artificial Sequence: Synthetic polynucleotide"
atggacatgagggtgcccgctcagctcctggggctcctgctgctgtggctgagaggtgcgcgctgtcaggtgcagctggtggagtctgggggaggcgtggtccagcctgggaggtccctgagactctcctgtgcagcatctggattcaccttcagtaactatggcatgcactgggtccgccaggctccaggcgaggggctggagtgggtggcagctatctggtttgatgcaagtgataaatactatgcagacgccgtgaagggccgattcaccatctccagagacaactccaagaacacgctgtatctgcaaatgaacagcctgagagccgaggacacggctgtgtattactgtgcgagagatattgcgatttttggagtggtccccgactactggggccagggaaccctggtcaccgtgtctagtgcctccaccaagggcccatcggtcttccccctggcaccctcctccaagagcacctctgggggcacagcggccctgggctgcctggtcaaggactacttccccgaaccggtgacggtgtcgtggaactcaggcgccctgaccagcggcgtgcacaccttcccggctgtcctacagtcctcaggactctactccctcagcagcgtggtgaccgtgccctccagcagcttgggcacccagacctacatctgcaacgtgaatcacaagcccagcaacaccaaggtggacaagaaagttgagcccaaatcttgtgacaaaactcacacatgcccaccgtgcccagcacctgaactcctggggggaccgtcagtcttcctcttccccccaaaacccaaggacaccctctacatcacccgggagcctgaggtcacatgcgtggtggtggacgtgagccacgaagaccctgaggtcaagttcaactggtacgtggacggcgtggaggtgcataatgccaagacaaagccgtgcgaggagcagtacggcagcacgtaccgttgcgtcagcgtcctcaccgtcctgcaccaggactggctgaatggcaaggagtacaagtgcaaggtgtccaacaaagccctcccagcccccatcgagaaaaccatctccaaagccaaagggcagccccgagaaccacaggtgtacaccctgcccccatcccgggaggagatgaccaagaaccaggtcagcctgacctgcctggtcaaaggcttctatcccagcgatatcgccgtggagtgggagagcaatgggcagccggagaacaactacaagaccacgcctcccgtgctggactccgacggctccttcttcctctatagcaagctcaccgtggacaagagtaggtggcagcaggggaacgtcttctcatgctccgtgatgcatgaggctctgcacaaccactacacgcagaagagcctctccctgtctccgggtaaa

SEQ ID NO: 4462 - protein, 450 aa, Artificial Sequence
  source: /note="Description of Artificial Sequence: Synthetic polypeptide"
QVQLVESGGGVVQPGRSLRLSCAASGFTFSNYGMHWVRQAPGEGLEWVAAIWFDASDKYYADAVKGRFTISRDNSKNTLYLQMNSLRAEDTAVYYCARDIAIFGVVPDYWGQGTLVTVSSASTKGPSVFPLAPSSKSTSGGTAALGCLVKDYFPEPVTVSWNSGALTSGVHTFPAVLQSSGLYSLSSVVTVPSSSLGTQTYICNVNHKPSNTKVDKKVEPKSCDKTHTCPPCPAPELLGGPSVFLFPPKPKDTLYITREPEVTCVVVDVSHEDPEVKFNWYVDGVEVHNAKTKPCEEQYGSTYRCVSVLTVLHQDWLNGKEYKCKVSNKALPAPIEKTISKAKGQPREPQVYTLPPSREEMTKNQVSLTCLVKGFYPSDIAVEWESNGQPENNYKTTPPVLDSDGSFFLYSKLTVDKSRWQQGNVFSCSVMHEALHNHYTQKSLSLSPGK

SEQ ID NO: 4463 - DNA, 1416 bp, Artificial Sequence
  source: /note="Description of Artificial Sequence: Synthetic polynucleotide"
atggacatgagggtgcccgctcagctcctggggctcctgctgctgtggctgagaggtgcgcgctgtcaggtgcagctggtggagtctgggggaggcgtggtccagcctgggaggtccctgagactctcctgtgcagcatctggattcaccttcagtaactatggcatgcactgggtccgccaggctccaggcgaggggctggagtgggtggcagctatctggtttgatgcaagtgataaatactatgcagacgccgtgaagggccgattcaccatctccagagacaactccaagaacacgctgtatctgcaaatgaacagcctgagagccgaggacacggctgtgtattactgtgcgagagatcaggcgatttttggagtggtccccgattactggggccagggaaccctggtcaccgtgtctagtgcctccaccaagggcccatcggtcttccccctggcaccctcctccaagagcacctctgggggcacagcggccctgggctgcctggtcaaggactacttccccgaaccggtgacggtgtcgtggaactcaggcgccctgaccagcggcgtgcacaccttcccggctgtcctacagtcctcaggactctactccctcagcagcgtggtgaccgtgccctccagcagcttgggcacccagacctacatctgcaacgtgaatcacaagcccagcaacaccaaggtggacaagaaagttgagcccaaatcttgtgacaaaactcacacatgcccaccgtgcccagcacctgaactcctggggggaccgtcagtcttcctcttccccccaaaacccaaggacaccctctacatcacccgggagcctgaggtcacatgcgtggtggtggacgtgagccacgaagaccctgaggtcaagttcaactggtacgtggacggcgtggaggtgcataatgccaagacaaagccgtgcgaggagcagtacggcagcacgtaccgttgcgtcagcgtcctcaccgtcctgcaccaggactggctgaatggcaaggagtacaagtgcaaggtgtccaacaaagccctcccagcccccatcgagaaaaccatctccaaagccaaagggcagccccgagaaccacaggtgtacaccctgcccccatcccgggaggagatgaccaagaaccaggtcagcctgacctgcctggtcaaaggcttctatcccagcgatatcgccgtggagtgggagagcaatgggcagccggagaacaactacaagaccacgcctcccgtgctggactccgacggctccttcttcctctatagcaagctcaccgtggacaagagtaggtggcagcaggggaacgtcttctcatgctccgtgatgcatgaggctctgcacaaccactacacgcagaagagcctctccctgtctccgggtaaa

SEQ ID NO: 4464 - protein, 450 aa, Artificial Sequence
  source: /note="Description of Artificial Sequence: Synthetic polypeptide"
QVQLVESGGGVVQPGRSLRLSCAASGFTFSNYGMHWVRQAPGEGLEWVAAIWFDASDKYYADAVKGRFTISRDNSKNTLYLQMNSLRAEDTAVYYCARDQAIFGVVPDYWGQGTLVTVSSASTKGPSVFPLAPSSKSTSGGTAALGCLVKDYFPEPVTVSWNSGALTSGVHTFPAVLQSSGLYSLSSVVTVPSSSLGTQTYICNVNHKPSNTKVDKKVEPKSCDKTHTCPPCPAPELLGGPSVFLFPPKPKDTLYITREPEVTCVVVDVSHEDPEVKFNWYVDGVEVHNAKTKPCEEQYGSTYRCVSVLTVLHQDWLNGKEYKCKVSNKALPAPIEKTISKAKGQPREPQVYTLPPSREEMTKNQVSLTCLVKGFYPSDIAVEWESNGQPENNYKTTPPVLDSDGSFFLYSKLTVDKSRWQQGNVFSCSVMHEALHNHYTQKSLSLSPGK

SEQ ID NO: 4465 - DNA, 1416 bp, Artificial Sequence; identical to SEQ ID NO: 4459
  source: /note="Description of Artificial Sequence: Synthetic polynucleotide"

SEQ ID NO: 4466 - protein, 450 aa, Artificial Sequence; identical to SEQ ID NO: 4460
  source: /note="Description of Artificial Sequence: Synthetic polypeptide"

SEQ ID NO: 4467 - DNA, 1416 bp, Artificial Sequence; identical to SEQ ID NO: 4461
  source: /note="Description of Artificial Sequence: Synthetic polynucleotide"

SEQ ID NO: 4468 - protein, 450 aa, Artificial Sequence; identical to SEQ ID NO: 4462
  source: /note="Description of Artificial Sequence: Synthetic polypeptide"

SEQ ID NO: 4469 - DNA, 1416 bp, Artificial Sequence
  source: /note="Description of Artificial Sequence: Synthetic polynucleotide"
atggacatgagggtgcccgctcagctcctggggctcctgctgctgtggctgagaggtgcgcgctgtcaggtgcagctggtggagtctgggggaggcgtggtccagcctgggaggtccctgagactctcctgtgcagcatctggattcaccttcagtaactatggcatgcactgggtccgccaggctccaggcgaggggctggagtgggtggcagctatctggtttgatgcaagtgataaatactatgcagacgccgtgaagggccgattcaccatctccagagacaactccaagaacacgctgtatctgcaaatgaacagcctgagagccgaggacacggctgtgtattactgtgcgagagatttggcgatttttggagtggtccccgactactggggccagggaaccctggtcaccgtgtctagtgcctccaccaagggcccatcggtcttccccctggcaccctcctccaagagcacctctgggggcacagcggccctgggctgcctggtcaaggactacttccccgaaccggtgacggtgtcgtggaactcaggcgccctgaccagcggcgtgcacaccttcccggctgtcctacagtcctcaggactctactccctcagcagcgtggtgaccgtgccctccagcagcttgggcacccagacctacatctgcaacgtgaatcacaagcccagcaacaccaaggtggacaagaaagttgagcccaaatcttgtgacaaaactcacacatgcccaccgtgcccagcacctgaactcctggggggaccgtcagtcttcctcttccccccaaaacccaaggacaccctctacatcacccgggagcctgaggtcacatgcgtggtggtggacgtgagccacgaagaccctgaggtcaagttcaactggtacgtggacggcgtggaggtgcataatgccaagacaaagccgtgcgaggagcagtacggcagcacgtaccgttgcgtcagcgtcctcaccgtcctgcaccaggactggctgaatggcaaggagtacaagtgcaaggtgtccaacaaagccctcccagcccccatcgagaaaaccatctccaaagccaaagggcagccccgagaaccacaggtgtacaccctgcccccatcccgggaggagatgaccaagaaccaggtcagcctgacctgcctggtcaaaggcttctatcccagcgatatcgccgtggagtgggagagcaatgggcagccggagaacaactacaagaccacgcctcccgtgctggactccgacggctccttcttcctctatagcaagctcaccgtggacaagagtaggtggcagcaggggaacgtcttctcatgctccgtgatgcatgaggctctgcacaaccactacacgcagaagagcctctccctgtctccgggtaaa

SEQ ID NO: 4470 - protein, 450 aa, Artificial Sequence
  source: /note="Description of Artificial Sequence: Synthetic polypeptide"
QVQLVESGGGVVQPGRSLRLSCAASGFTFSNYGMHWVRQAPGEGLEWVAAIWFDASDKYYADAVKGRFTISRDNSKNTLYLQMNSLRAEDTAVYYCARDLAIFGVVPDYWGQGTLVTVSSASTKGPSVFPLAPSSKSTSGGTAALGCLVKDYFPEPVTVSWNSGALTSGVHTFPAVLQSSGLYSLSSVVTVPSSSLGTQTYICNVNHKPSNTKVDKKVEPKSCDKTHTCPPCPAPELLGGPSVFLFPPKPKDTLYITREPEVTCVVVDVSHEDPEVKFNWYVDGVEVHNAKTKPCEEQYGSTYRCVSVLTVLHQDWLNGKEYKCKVSNKALPAPIEKTISKAKGQPREPQVYTLPPSREEMTKNQVSLTCLVKGFYPSDIAVEWESNGQPENNYKTTPPVLDSDGSFFLYSKLTVDKSRWQQGNVFSCSVMHEALHNHYTQKSLSLSPGK

SEQ ID NO: 4471 - DNA, 1416 bp, Artificial Sequence; identical to SEQ ID NO: 4469
  source: /note="Description of Artificial Sequence: Synthetic polynucleotide"

SEQ ID NO: 4472 - protein, 450 aa, Artificial Sequence; identical to SEQ ID NO: 4470
  source: /note="Description of Artificial Sequence: Synthetic polypeptide"

SEQ ID NO: 4473 - DNA, 1416 bp, Artificial Sequence
  source: /note="Description of Artificial Sequence: Synthetic polynucleotide"
atggacatgagggtgcccgctcagctcctggggctcctgctgctgtggctgagaggtgcgcgctgtcaggtgcagctggtggagtctgggggaggcgtggtccagcctgggaggtccctgagactctcctgtgcagcatctggattcaccttccagaactatggcatgcactgggtccgccaggctccaggcgaggggctggagtgggtggcagctatctggtttgatgcgtctgacaaatactatgcagacgccgtgaagggccgattcaccatctccagagacaactccaagaacacgctgtatctgcaaatgaacagcctgagagccgaggacacggctgtgtattactgtgcgagagatcttgcgatttttggagtggtccccgactactggggccagggaaccctggtcaccgtgtctagtgcctccaccaagggcccatcggtcttccccctggcaccctcctccaagagcacctctgggggcacagcggccctgggctgcctggtcaaggactacttccccgaaccggtgacggtgtcgtggaactcaggcgccctgaccagcggcgtgcacaccttcccggctgtcctacagtcctcaggactctactccctcagcagcgtggtgaccgtgccctccagcagcttgggcacccagacctacatctgcaacgtgaatcacaagcccagcaacaccaaggtggacaagaaagttgagcccaaatcttgtgacaaaactcacacatgcccaccgtgcccagcacctgaactcctggggggaccgtcagtcttcctcttccccccaaaacccaaggacaccctctacatcacccgggagcctgaggtcacatgcgtggtggtggacgtgagccacgaagaccctgaggtcaagttcaactggtacgtggacggcgtggaggtgcataatgccaagacaaagccgtgcgaggagcagtacggcagcacgtaccgttgcgtcagcgtcctcaccgtcctgcaccaggactggctgaatggcaaggagtacaagtgcaaggtgtccaacaaagccctcccagcccccatcgagaaaaccatctccaaagccaaagggcagccccgagaaccacaggtgtacaccctgcccccatcccgggaggagatgaccaagaaccaggtcagcctgacctgcctggtcaaaggcttctatcccagcgatatcgccgtggagtgggagagcaatgggcagccggagaacaactacaagaccacgcctcccgtgctggactccgacggctccttcttcctctatagcaagctcaccgtggacaagagtaggtggcagcaggggaacgtcttctcatgctccgtgatgcatgaggctctgcacaaccactacacgcagaagagcctctccctgtctccgggtaaa

SEQ ID NO: 4474 - protein, 450 aa, Artificial Sequence
  source: /note="Description of Artificial Sequence: Synthetic polypeptide"
QVQLVESGGGVVQPGRSLRLSCAASGFTFQNYGMHWVRQAPGEGLEWVAAIWFDASDKYYADAVKGRFTISRDNSKNTLYLQMNSLRAEDTAVYYCARDLAIFGVVPDYWGQGTLVTVSSASTKGPSVFPLAPSSKSTSGGTAALGCLVKDYFPEPVTVSWNSGALTSGVHTFPAVLQSSGLYSLSSVVTVPSSSLGTQTYICNVNHKPSNTKVDKKVEPKSCDKTHTCPPCPAPELLGGPSVFLFPPKPKDTLYITREPEVTCVVVDVSHEDPEVKFNWYVDGVEVHNAKTKPCEEQYGSTYRCVSVLTVLHQDWLNGKEYKCKVSNKALPAPIEKTISKAKGQPREPQVYTLPPSREEMTKNQVSLTCLVKGFYPSDIAVEWESNGQPENNYKTTPPVLDSDGSFFLYSKLTVDKSRWQQGNVFSCSVMHEALHNHYTQKSLSLSPGK

SEQ ID NO: 4475 - protein, 6 aa, Artificial Sequence
  source: /note="Description of Artificial Sequence: Synthetic 6xHis tag"
HHHHHH

SEQ ID NO: 4476 - protein, 16 aa, Artificial Sequence
  source: /note="Description of Artificial Sequence: Synthetic peptide"
  MOD_RES (16)..(16): Lys(ivdde)
GGGGSGGGGSGGGGSX

SEQ ID NO: 4477 - protein, 42 aa, Artificial Sequence
  source: /note="Description of Artificial Sequence: Synthetic polypeptide"
  MOD_RES (2)..(2): Alpha-amino-isobutyric acid
YXEGTFISDYSIAMDKIHQQDFVNWLLAQKGKKNDWKHNITQ

SEQ ID NO: 4478 - protein, 58 aa, Artificial Sequence
  source: /note="Description of Artificial Sequence: Synthetic polypeptide"
  MOD_RES (2)..(2): Alpha-amino-isobutyric acid
  MOD_RES (58)..(58): Lys(BrAc)
YXEGTFISDYSIAMDKIHQQDFVNWLLAQKGKKNDWKHNITQGGGGSGGGGSGGGGSX

SEQ ID NO: 4479 - protein, 448 aa, Artificial Sequence
  source: /note="Description of Artificial Sequence: Synthetic polypeptide"
QVQLVESGGGVVQPGRSLRLSCAASGFTFSSYGMHWVRQAPGKGLEWVAVIWYDGSNKYYADSVKGRFTISRDNSKNTLYLQMNSLRAEDTAVYYCARYNFNYGMDVWGQGTTVTVSSASTKGPSVFPLAPSSKSTSGGTAALGCLVKDYFPEPVTVSWNSGALTSGVHTFPAVLQSSGLYSLSSVVTVPSSSLGTQTYICNVNHKPSNTKVDKKVEPKSCDKTHTCPPCPAPELLGGPSVFLFPPKPKDTLMISRTPEVTCVVVDVSHEDPCVKFNWYVDGVEVHNAKTKPCEEQYGSTYRCVSVLTVLHQDWLNGKEYKCKVSNKALPAPIEKTISKAKGQPREPQVYTLPPSREEMTKNQVSLTCLVKGFYPSDIAVEWESNGQPENNYKTTPPVLDSDGSFFLYSKLTVDKSRWQQGNVFSCSVMHEALHNHYTQKSLSLSPGK

SEQ ID NO: 4480 - protein, 214 aa, Artificial Sequence
  source: /note="Description of Artificial Sequence: Synthetic polypeptide"
DIQMTQSPSSVSASVGDRVTITCRASQGISRRLAWYQQKPGKAPKLLIYAASSLQSGVPSRFSGSGSGTDFTLTISSLQPEDFATYYCQQANSFPFTFGPGTKVDIKRTVAAPSVFIFPPSDEQLKSGTASVVCLLNNFYPREAKVQWKVDNALQSGNSQESVTEQDSKDSTYSLSSTLTLSKADYEKHKVYACEVTHQGLSSPVTKSFNRGEC

What is claimed is:

1. A method of treating a subject with a disorder associated with elevated cortisol levels, the method comprising administering to the subject a therapeutically effective amount of an antigen binding protein that specifically binds to a protein having an amino acid sequence having at least 90% amino acid sequence identity to an amino acid sequence of a GIPR.

2. The method of claim 1, wherein said disorder is Cushing's syndrome.

3. The method of any preceding claim, wherein said antigen binding protein specifically binds to a human gastric inhibitory peptide receptor (GIPR) polypeptide.

4. The method of claim 3, wherein said human GIPR has a sequence comprising a sequence selected from the group consisting of SEQ ID NO: 3141, SEQ ID NO: 3143, and SEQ ID NO: 3145.

5. The method of claim 4, wherein said antigen binding protein is a monoclonal antibody, a polyclonal antibody, a recombinant antibody, a human antibody, a humanized antibody, a chimeric antibody, a multispecific antibody, or an antibody fragment thereof.

6. The method of claim 5, wherein said antibody fragment is a Fab fragment, a Fab′ fragment, or a F(ab′)2 fragment.

7. The method of claim 6, wherein said antigen binding protein is a human antibody.

8. The method of claim 6, wherein said antigen binding protein is a monoclonal antibody.

9. The method of claim 6, wherein said antigen binding protein is of the IgG1-, IgG2- IgG3- or IgG4-type.

10. The method of claim 9, wherein said antigen binding protein is of the IgG1- or the IgG2-type.

11. The method of claim 6, wherein said antigen binding protein is coupled to a labeling group.

12. The method of claim 6, wherein said antigen binding protein inhibits binding of GIP to the extracellular portion of human GIPR.

13. The method of claim 6, wherein said antigen binding protein is an antibody or a fragment thereof, and wherein said antibody comprises a CDRL1, a CDRL2, a CDRL3, a CDRH1, a CDRH2, and a CDRH3, wherein said CDRL1 comprises a sequence selected from the group consisting of SEQ ID NOs: 629-785; said CDRL2 comprises a sequence selected from the group consisting of SEQ ID NOs: 786-942; said CDRL3 comprises a sequence selected from the group consisting of SEQ ID NOs: 943-1099; said CDRH1 comprises a sequence selected from the group consisting of SEQ ID NOs: 1100-1256; said CDRH2 comprises a sequence selected from the group consisting of SEQ ID NOs: 1257-1413; and said CDRH3 comprises a sequence selected from the group consisting of SEQ ID NOs: 1414-1570.

14. The method of claim 6, wherein said antigen binding protein is an antibody or a fragment thereof, and wherein said antibody comprises a CDRL1, a CDRL2, a CDRL3, a CDRH1, a CDRH2, and a CDRH3, wherein each CDRL1, CDRL2, CDRL3, CDRH1, CDRH2, and CDRH3, respectively, comprises a sequence selected from the group consisting of SEQ ID NO: 629, SEQ ID NO: 786, SEQ ID NO: 943, SEQ ID NO: 1100, SEQ ID NO: 1257, and SEQ ID NO: 1414; SEQ ID NO: 630, SEQ ID NO: 787, SEQ ID NO: 944, SEQ ID NO: 1101, SEQ ID NO: 1258, and SEQ ID NO: 1415; SEQ ID NO: 631, SEQ ID NO: 788, SEQ ID NO: 945, SEQ ID NO: 1102, SEQ ID NO: 1259, and SEQ ID NO: 1416; SEQ ID NO: 632, SEQ ID NO: 789, SEQ ID NO: 946, SEQ ID NO: 1103, SEQ ID NO: 1260, and SEQ ID NO: 1417; SEQ ID NO: 633, SEQ ID NO: 790, SEQ ID NO: 947, SEQ ID NO: 1104, SEQ ID NO: 1261, and SEQ ID NO: 1418; SEQ ID NO: 634, SEQ ID NO: 791, SEQ ID NO: 948, SEQ ID NO: 1105, SEQ ID NO: 1262, and SEQ ID NO: 1419; SEQ ID NO: 635, SEQ ID NO: 792, SEQ ID NO: 949, SEQ ID NO: 1106, SEQ ID NO: 1263, and SEQ ID NO: 1420; SEQ ID NO: 636, SEQ ID NO: 793, SEQ ID NO: 950, SEQ ID NO: 1107, SEQ ID NO: 1264, and SEQ ID NO: 1421; SEQ ID NO: 637, SEQ ID NO: 794, SEQ ID NO: 951, SEQ ID NO: 1108, SEQ ID NO: 1265, and SEQ ID NO: 1422; SEQ ID NO: 638, SEQ ID NO: 795, SEQ ID NO: 952, SEQ ID NO: 1109, SEQ ID NO: 1266, and SEQ ID NO: 1423; SEQ ID NO: 639, SEQ ID NO: 796, SEQ ID NO: 953, SEQ ID NO: 1110, SEQ ID NO: 1267, and SEQ ID NO: 1424; SEQ ID NO: 640, SEQ ID NO: 797, SEQ ID NO: 954, SEQ ID NO: 1111, SEQ ID NO: 1268, and SEQ ID NO: 1425; SEQ ID NO: 641, SEQ ID NO: 798, SEQ ID NO: 955, SEQ ID NO: 1112, SEQ ID NO: 1269, and SEQ ID NO: 1426; SEQ ID NO: 642, SEQ ID NO: 799, SEQ ID NO: 956, SEQ ID NO: 1113, SEQ ID NO: 1270, and SEQ ID NO: 1427; SEQ ID NO: 643, SEQ ID NO: 800, SEQ ID NO: 957, SEQ ID NO: 1114, SEQ ID NO: 1271, and SEQ ID NO: 1428; SEQ ID NO: 644, SEQ ID NO: 801, SEQ ID NO: 958, SEQ ID NO: 1115, SEQ ID NO: 1272, and SEQ ID NO: 1429; SEQ ID NO: 645, SEQ ID NO: 802, SEQ ID NO: 959, SEQ ID NO: 1116, SEQ ID NO: 1273, and SEQ ID NO: 1430; SEQ ID NO: 646, SEQ ID NO: 803, SEQ ID NO: 960, SEQ ID NO: 1117, SEQ ID NO: 1274, and SEQ ID NO: 1431; SEQ ID NO: 647, SEQ ID NO: 804, SEQ ID NO: 961, SEQ ID NO: 1118, SEQ ID NO: 1275, and SEQ ID NO: 1432; SEQ ID NO: 648, SEQ ID NO: 805, SEQ ID NO: 962, SEQ ID NO: 1119, SEQ ID NO: 1276, and SEQ ID NO: 1433; SEQ ID NO: 649, SEQ ID NO: 806, SEQ ID NO: 963, SEQ ID NO: 1120, SEQ ID NO: 1277, and SEQ ID NO: 1434; SEQ ID NO: 650, SEQ ID NO: 807, SEQ ID NO: 964, SEQ ID NO: 1121, SEQ ID NO: 1278, and SEQ ID NO: 1435; SEQ ID NO: 651, SEQ ID NO: 808, SEQ ID NO: 965, SEQ ID NO: 1122, SEQ ID NO: 1279, and SEQ ID NO: 1436; SEQ ID NO: 652, SEQ ID NO: 809, SEQ ID NO: 966, SEQ ID NO: 1123, SEQ ID NO: 1280, and SEQ ID NO: 1437; SEQ ID NO: 653, SEQ ID NO: 810, SEQ ID NO: 967, SEQ ID NO: 1124, SEQ ID NO: 1281, and SEQ ID NO: 1438; SEQ ID NO: 654, SEQ ID NO: 811, SEQ ID NO: 968, SEQ ID NO: 1125, SEQ ID NO: 1282, and SEQ ID NO: 1439; SEQ ID NO: 655, SEQ ID NO: 812, SEQ ID NO: 969, SEQ ID NO: 1126, SEQ ID NO: 1283, and SEQ ID NO: 1440; SEQ ID NO: 656, SEQ ID NO: 813, SEQ ID NO: 970, SEQ ID NO: 1127, SEQ ID NO: 1284, and SEQ ID NO: 1441; SEQ ID NO: 657, SEQ ID NO: 814, SEQ ID NO: 971, SEQ ID NO: 1128, SEQ ID NO: 1285, and SEQ ID NO: 1442; SEQ ID NO: 658, SEQ ID NO: 815, SEQ ID NO: 972, SEQ ID NO: 1129, SEQ ID NO: 1286, and SEQ ID NO: 1443; SEQ ID NO: 659, SEQ ID NO: 816, SEQ ID NO: 973, SEQ ID NO: 1130, SEQ ID NO: 1287, and SEQ ID NO: 1444; SEQ ID NO: 660, SEQ ID NO: 817, SEQ ID NO: 974, SEQ ID NO: 1131, SEQ ID NO: 1288, and SEQ ID NO: 1445; SEQ ID NO: 661, SEQ ID NO: 818, SEQ ID NO: 975, SEQ ID NO: 1132, SEQ ID NO: 1289, and SEQ ID NO: 1446; SEQ ID NO: 662, SEQ ID NO: 819, SEQ ID NO: 976, SEQ ID NO: 1133, SEQ ID NO: 1290, and SEQ ID NO: 1447; SEQ ID NO: 663, SEQ ID NO: 820, SEQ ID NO: 977, SEQ ID NO: 1134, SEQ ID NO: 1291, and SEQ ID NO: 1448; SEQ ID NO: 664, SEQ ID NO: 821, SEQ ID NO: 978, SEQ ID NO: 1135, SEQ ID NO: 1292, and SEQ ID NO: 1449; SEQ ID NO: 665, SEQ ID NO: 822, SEQ ID NO: 979, SEQ ID NO: 1136, SEQ ID NO: 1293, and SEQ ID NO: 1450; SEQ ID NO: 666, SEQ ID NO: 823, SEQ ID NO: 980, SEQ ID NO: 1137, SEQ ID NO: 1294, and SEQ ID NO: 1451; SEQ ID NO: 667, SEQ ID NO: 824, SEQ ID NO: 981, SEQ ID NO: 1138, SEQ ID NO: 1295, and SEQ ID NO: 1452; SEQ ID NO: 668, SEQ ID NO: 825, SEQ ID NO: 982, SEQ ID NO: 1139, SEQ ID NO: 1296, and SEQ ID NO: 1453; SEQ ID NO: 669, SEQ ID NO: 826, SEQ ID NO: 983, SEQ ID NO: 1140, SEQ ID NO: 1297, and SEQ ID NO: 1454; SEQ ID NO: 670, SEQ ID NO: 827, SEQ ID NO: 984, SEQ ID NO: 1141, SEQ ID NO: 1298, and SEQ ID NO: 1455; SEQ ID NO: 671, SEQ ID NO: 828, SEQ ID NO: 985, SEQ ID NO: 1142, SEQ ID NO: 1299, and SEQ ID NO: 1456; SEQ ID NO: 672, SEQ ID NO: 829, SEQ ID NO: 986, SEQ ID NO: 1143, SEQ ID NO: 1300, and SEQ ID NO: 1457; SEQ ID NO: 673, SEQ ID NO: 830, SEQ ID NO: 987, SEQ ID NO: 1144, SEQ ID NO: 1301, and SEQ ID NO: 1458; SEQ ID NO: 674, SEQ ID NO: 831, SEQ ID NO: 988, SEQ ID NO: 1145, SEQ ID NO: 1302, and SEQ ID NO: 1459; SEQ ID NO: 675, SEQ ID NO: 832, SEQ ID NO: 989, SEQ ID NO: 1146, SEQ ID NO: 1303, and SEQ ID NO: 1460; SEQ ID NO: 676, SEQ ID NO: 833, SEQ ID NO: 990, SEQ ID NO: 1147, SEQ ID NO: 1304, and SEQ ID NO: 1461; SEQ ID NO: 677, SEQ ID NO: 834, SEQ ID NO: 991, SEQ ID NO: 1148, SEQ ID NO: 1305, and SEQ ID NO: 1462; SEQ ID NO: 678, SEQ ID NO: 835, SEQ ID NO: 992, SEQ ID NO: 1149, SEQ ID NO: 1306, and SEQ ID NO: 1463; SEQ ID NO: 679, SEQ ID NO: 836, SEQ ID NO: 993, SEQ ID NO: 1150, SEQ ID NO: 1307, and SEQ ID NO: 1464; SEQ ID NO: 680, SEQ ID NO: 837, SEQ ID NO: 994, SEQ ID NO: 1151, SEQ ID NO: 1308, and SEQ ID NO: 1465; SEQ ID NO: 681, SEQ ID NO: 838, SEQ ID NO: 995, SEQ ID NO: 1152, SEQ ID NO: 1309, and SEQ ID NO: 1466; SEQ ID NO: 682, SEQ ID NO: 839, SEQ ID NO: 996, SEQ ID NO: 1153, SEQ ID NO: 1310, and SEQ ID NO: 1467; SEQ ID NO: 683, SEQ ID NO: 840, SEQ ID NO: 997, SEQ ID NO: 1154, SEQ ID NO: 1311, and SEQ ID NO: 1468; SEQ ID NO: 684, SEQ ID NO: 841, SEQ ID NO: 998, SEQ ID NO: 1155, SEQ ID NO: 1312, and SEQ ID NO: 1469; SEQ ID NO: 685, SEQ ID NO: 842, SEQ ID NO: 999, SEQ ID NO: 1156, SEQ ID NO: 1313, and SEQ ID NO: 1470; SEQ ID NO: 686, SEQ ID NO: 843, SEQ ID NO: 1000, SEQ ID NO: 1157, SEQ ID NO: 1314, and SEQ ID NO: 1471; SEQ ID NO: 687, SEQ ID NO: 844, SEQ ID NO: 1001, SEQ ID NO: 1158, SEQ ID NO: 1315, and SEQ ID NO: 1472; SEQ ID NO: 688, SEQ ID NO: 845, SEQ ID NO: 1002, SEQ ID NO: 1159, SEQ ID NO: 1316, and SEQ ID NO: 1473; SEQ ID NO: 689, SEQ ID NO: 846, SEQ ID NO: 1003, SEQ ID NO: 1160, SEQ ID NO: 1317, and SEQ ID NO: 1474; SEQ ID NO: 690, SEQ ID NO: 847, SEQ ID NO: 1004, SEQ ID NO: 1161, SEQ ID NO: 1318, and SEQ ID NO: 1475; SEQ ID NO: 691, SEQ ID NO: 848, SEQ ID NO: 1005, SEQ ID NO: 1162, SEQ ID NO: 1319, and SEQ ID NO: 1476; SEQ ID NO: 692, SEQ ID NO: 849, SEQ ID NO: 1006, SEQ ID NO: 1163, SEQ ID NO: 1320, and SEQ ID NO: 1477; SEQ ID NO: 693, SEQ ID NO: 850, SEQ ID NO: 1007, SEQ ID NO: 1164, SEQ ID NO: 1321, and SEQ ID NO: 1478; SEQ ID NO: 694, SEQ ID NO: 851, SEQ ID NO: 1008, SEQ ID NO: 1165, SEQ ID NO: 1322, and SEQ ID NO: 1479; SEQ ID NO: 695, SEQ ID NO: 852, SEQ ID NO: 1009, SEQ ID NO: 1166, SEQ ID NO: 1323, and SEQ ID NO: 1480; SEQ ID NO: 696, SEQ ID NO: 853, SEQ ID NO: 1010, SEQ ID NO: 1167, SEQ ID NO: 1324, and SEQ ID NO: 1481; SEQ ID NO: 697, SEQ ID NO: 854, SEQ ID NO: 1011, SEQ ID NO: 1168, SEQ ID NO: 1325, and SEQ ID NO: 1482; SEQ ID NO: 698, SEQ ID NO: 855, SEQ ID NO: 1012, SEQ ID NO: 1169, SEQ ID NO: 1326, and SEQ ID NO: 1483; SEQ ID NO: 699, SEQ ID NO: 856, SEQ ID NO: 1013, SEQ ID NO: 1170, SEQ ID NO: 1327, and SEQ ID NO: 1484; SEQ ID NO: 700, SEQ ID NO: 857, SEQ ID NO: 1014, SEQ ID NO: 1171, SEQ ID NO: 1328, and SEQ ID NO: 1485; SEQ ID NO: 701, SEQ ID NO: 858, SEQ ID NO: 1015, SEQ ID NO: 1172, SEQ ID NO: 1329, and SEQ ID NO: 1486; SEQ ID NO: 702, SEQ ID NO: 859, SEQ ID NO: 1016, SEQ ID NO: 1173, SEQ ID NO: 1330, and SEQ ID NO: 1487; SEQ ID NO: 703, SEQ ID NO: 860, SEQ ID NO: 1017, SEQ ID NO: 1174, SEQ ID NO: 1331, and SEQ ID NO: 1488; SEQ ID NO: 704, SEQ ID NO: 861, SEQ ID NO: 1018, SEQ ID NO: 1175, SEQ ID NO: 1332, and SEQ ID NO: 1489; SEQ ID NO: 705, SEQ ID NO: 862, SEQ ID NO: 1019, SEQ ID NO: 1176, SEQ ID NO: 1333, and SEQ ID NO: 1490; SEQ ID NO: 706, SEQ ID NO: 863, SEQ ID NO: 1020, SEQ ID NO: 1177, SEQ ID NO: 1334, and SEQ ID NO: 1491; SEQ ID NO: 707, SEQ ID NO: 864, SEQ ID NO: 1021, SEQ ID NO: 1178, SEQ ID NO: 1335, and SEQ ID NO: 1492; SEQ ID NO: 708, SEQ ID NO: 865, SEQ ID NO: 1022, SEQ ID NO: 1179, SEQ ID NO: 1336, and SEQ ID NO: 1493; SEQ ID NO: 709, SEQ ID NO: 866, SEQ ID NO: 1023, SEQ ID NO: 1180, SEQ ID NO: 1337, and SEQ ID NO: 1494; SEQ ID NO: 710, SEQ ID NO: 867, SEQ ID NO: 1024, SEQ ID NO: 1181, SEQ ID NO: 1338, and SEQ ID NO: 1495; SEQ ID NO: 711, SEQ ID NO: 868, SEQ ID NO: 1025, SEQ ID NO: 1182, SEQ ID NO: 1339, and SEQ ID NO: 1496; SEQ ID NO: 712, SEQ ID NO: 869, SEQ ID NO: 1026, SEQ ID NO: 1183, SEQ ID NO: 1340, and SEQ ID NO: 1497; SEQ ID NO: 713, SEQ ID NO: 870, SEQ ID NO: 1027, SEQ ID NO: 1184, SEQ ID NO: 1341, and SEQ ID NO: 1498; SEQ ID NO: 714, SEQ ID NO: 871, SEQ ID NO: 1028, SEQ ID NO: 1185, SEQ ID NO: 1342, and SEQ ID NO: 1499; SEQ ID NO: 715, SEQ ID NO: 872, SEQ ID NO: 1029, SEQ ID NO: 1186, SEQ ID NO: 1343, and SEQ ID NO: 1500; SEQ ID NO: 716, SEQ ID NO: 873, SEQ ID NO: 1030, SEQ ID NO: 1187, SEQ ID NO: 1344, and SEQ ID NO: 1501; SEQ ID NO: 717, SEQ ID NO: 874, SEQ ID NO: 1031, SEQ ID NO: 1188, SEQ ID NO: 1345, and SEQ ID NO: 1502; SEQ ID NO: 718, SEQ ID NO: 875, SEQ ID NO: 1032, SEQ ID NO: 1189, SEQ ID NO: 1346, and SEQ ID NO: 1503; SEQ ID NO: 719, SEQ ID NO: 876, SEQ ID NO: 1033, SEQ ID NO: 1190, SEQ ID NO: 1347, and SEQ ID NO: 1504; SEQ ID NO: 720, SEQ ID NO: 877, SEQ ID NO: 1034, SEQ ID NO: 1191, SEQ ID NO: 1348, and SEQ ID NO: 1505; SEQ ID NO: 721, SEQ ID NO: 878, SEQ ID NO: 1035, SEQ ID NO: 1192, SEQ ID NO: 1349, and SEQ ID NO: 1506; SEQ ID NO: 722, SEQ ID NO: 879, SEQ ID NO: 1036, SEQ ID NO: 1193, SEQ ID NO: 1350, and SEQ ID NO: 1507; SEQ ID NO: 723, SEQ ID NO: 880, SEQ ID NO: 1037, SEQ ID NO: 1194, SEQ ID NO: 1351, and SEQ ID NO: 1508; SEQ ID NO: 724, SEQ ID NO: 881, SEQ ID NO: 1038, SEQ ID NO: 1195, SEQ ID NO: 1352, and SEQ ID NO: 1509; SEQ ID NO: 725, SEQ ID NO: 882, SEQ ID NO: 1039, SEQ ID NO: 1196, SEQ ID NO: 1353, and SEQ ID NO: 1510; SEQ ID NO: 726, SEQ ID NO: 883, SEQ ID NO: 1040, SEQ ID NO: 1197, SEQ ID NO: 1354, and SEQ ID NO: 1511; SEQ ID NO: 727, SEQ ID NO: 884, SEQ ID NO: 1041, SEQ ID NO: 1198, SEQ ID NO: 1355, and SEQ ID NO: 1512; SEQ ID NO: 728, SEQ ID NO: 885, SEQ ID NO: 1042, SEQ ID NO: 1199, SEQ ID NO: 1356, and SEQ ID NO: 1513; SEQ ID NO: 729, SEQ ID NO: 886, SEQ ID NO: 1043, SEQ ID NO: 1200, SEQ ID NO: 1357, and SEQ ID NO: 1514; SEQ ID NO: 730, SEQ ID NO: 887, SEQ ID NO: 1044, SEQ ID NO: 1201, SEQ ID NO: 1358, and SEQ ID NO: 1515; SEQ ID NO: 731, SEQ ID NO: 888, SEQ ID NO: 1045, SEQ ID NO: 1202, SEQ ID NO: 1359, and SEQ ID NO: 1516; SEQ ID NO: 732, SEQ ID NO: 889, SEQ ID NO: 1046, SEQ ID NO: 1203, SEQ ID NO: 1360, and SEQ ID NO: 1517; SEQ ID NO: 733, SEQ ID NO: 890, SEQ ID NO: 1047, SEQ ID NO: 1204, SEQ ID NO: 1361, and SEQ ID NO: 1518; SEQ ID NO: 734, SEQ ID NO: 891, SEQ ID NO: 1048, SEQ ID NO: 1205, SEQ ID NO: 1362, and SEQ ID NO: 1519; SEQ ID NO: 735, SEQ ID NO: 892, SEQ ID NO: 1049, SEQ ID NO: 1206, SEQ ID NO: 1363, and SEQ ID NO: 1520; SEQ ID NO: 736, SEQ ID NO: 893, SEQ ID NO: 1050, SEQ ID NO: 1207, SEQ ID NO: 1364, and SEQ ID NO: 1521; SEQ ID NO: 737, SEQ ID NO: 894, SEQ ID NO: 1051, SEQ ID NO: 1208, SEQ ID NO: 1365, and SEQ ID NO: 1522; SEQ ID NO: 738, SEQ ID NO: 895, SEQ ID NO: 1052, SEQ ID NO: 1209, SEQ ID NO: 1366, and SEQ ID NO: 1523; SEQ ID NO: 739, SEQ ID NO: 896, SEQ ID NO: 1053, SEQ ID NO: 1210, SEQ ID NO: 1367, and SEQ ID NO: 1524; SEQ ID NO: 740, SEQ ID NO: 897, SEQ ID NO: 1054, SEQ ID NO: 1211, SEQ ID NO: 1368, and SEQ ID NO: 1525; SEQ ID NO: 741, SEQ ID NO: 898, SEQ ID NO: 1055, SEQ ID NO: 1212, SEQ ID NO: 1369, and SEQ ID NO: 1526; SEQ ID NO: 742, SEQ ID NO: 899, SEQ ID NO: 1056, SEQ ID NO: 1213, SEQ ID NO: 1370, and SEQ ID NO: 1527; SEQ ID NO: 743, SEQ ID NO: 900, SEQ ID NO: 1057, SEQ ID NO: 1214, SEQ ID NO: 1371, and SEQ ID NO: 1528; SEQ ID NO: 744, SEQ ID NO: 901, SEQ ID NO: 1058, SEQ ID NO: 1215, SEQ ID NO: 1372, and SEQ ID NO: 1529; SEQ ID NO: 745, SEQ ID NO: 902, SEQ ID NO: 1059, SEQ ID NO: 1216, SEQ ID NO: 1373, and SEQ ID NO: 1530; SEQ ID NO: 746, SEQ ID NO: 903, SEQ ID NO: 1060, SEQ ID NO: 1217, SEQ ID NO: 1374, and SEQ ID NO: 1531; SEQ ID NO: 747, SEQ ID NO: 904, SEQ ID NO: 1061, SEQ ID NO: 1218, SEQ ID NO: 1375, and SEQ ID NO: 1532; SEQ ID NO: 748, SEQ ID NO: 905, SEQ ID NO: 1062, SEQ ID NO: 1219, SEQ ID NO: 1376, and SEQ ID NO: 1533; SEQ ID NO: 749, SEQ ID NO: 906, SEQ ID NO: 1063, SEQ ID NO: 1220, SEQ ID NO: 1377, and SEQ ID NO: 1534; SEQ ID NO: 750, SEQ ID NO: 907, SEQ ID NO: 1064, SEQ ID NO: 1221, SEQ ID NO: 1378, and SEQ ID NO: 1535; SEQ ID NO: 751, SEQ ID NO: 908, SEQ ID NO: 1065, SEQ ID NO: 1222, SEQ ID NO: 1379, and SEQ ID NO: 1536; SEQ ID NO: 752, SEQ ID NO: 909, SEQ ID NO: 1066, SEQ ID NO: 1223, SEQ ID NO: 1380, and SEQ ID NO: 1537; SEQ ID NO: 753, SEQ ID NO: 910, SEQ ID NO: 1067, SEQ ID NO: 1224, SEQ ID NO: 1381, and SEQ ID NO: 1538; SEQ ID NO: 754, SEQ ID NO: 911, SEQ ID NO: 1068, SEQ ID NO: 1225, SEQ ID NO: 1382, and SEQ ID NO: 1539; SEQ ID NO: 755, SEQ ID NO: 912, SEQ ID NO: 1069, SEQ ID NO: 1226, SEQ ID NO: 1383, and SEQ ID NO: 1540; SEQ ID NO: 756, SEQ ID NO: 913, SEQ ID NO: 1070, SEQ ID NO: 1227, SEQ ID NO: 1384, and SEQ ID NO: 1541; SEQ ID NO: 757, SEQ ID NO: 914, SEQ ID NO: 1071, SEQ ID NO: 1228, SEQ ID NO: 1385, and SEQ ID NO: 1542; SEQ ID NO: 758, SEQ ID NO: 915, SEQ ID NO: 1072, SEQ ID NO: 1229, SEQ ID NO: 1386, and SEQ ID NO: 1543; SEQ ID NO: 759, SEQ ID NO: 916, SEQ ID NO: 1073, SEQ ID NO: 1230, SEQ ID NO: 1387, and SEQ ID NO: 1544; SEQ ID NO: 760, SEQ ID NO: 917, SEQ ID NO: 1074, SEQ ID NO: 1231, SEQ ID NO: 1388, and SEQ ID NO: 1545; SEQ ID NO: 761, SEQ ID NO: 918, SEQ ID NO: 1075, SEQ ID NO: 1232, SEQ ID NO: 1389, and SEQ ID NO: 1546; SEQ ID NO: 762, SEQ ID NO: 919, SEQ ID NO: 1076, SEQ ID NO: 1233, SEQ ID NO: 1390, and SEQ ID NO: 1547; SEQ ID NO: 763, SEQ ID NO: 920, SEQ ID NO: 1077, SEQ ID NO: 1234, SEQ ID NO: 1391, and SEQ ID NO: 1548; SEQ ID NO: 764, SEQ ID NO: 921, SEQ ID NO: 1078, SEQ ID NO: 1235, SEQ ID NO: 1392, and SEQ ID NO: 1549; SEQ ID NO: 765, SEQ ID NO: 922, SEQ ID NO: 1079, SEQ ID NO: 1236, SEQ ID NO: 1393, and SEQ ID NO: 1550; SEQ ID NO: 766, SEQ ID NO: 923, SEQ ID NO: 1080, SEQ ID NO: 1237, SEQ ID NO: 1394, and SEQ ID NO: 1551; SEQ ID NO: 767, SEQ ID NO: 924, SEQ ID NO: 1081, SEQ ID NO: 1238, SEQ ID NO: 1395, and SEQ ID NO: 1552; SEQ ID NO: 768, SEQ ID NO: 925, SEQ ID NO: 1082, SEQ ID NO: 1239, SEQ ID NO: 1396, and SEQ ID NO: 1553; SEQ ID NO: 769, SEQ ID NO: 926, SEQ ID NO: 1083, SEQ ID NO: 1240, SEQ ID NO: 1397, and SEQ ID NO: 1554; SEQ ID NO: 770, SEQ ID NO: 927, SEQ ID NO: 1084, SEQ ID NO: 1241, SEQ ID NO: 1398, and SEQ ID NO: 1555; SEQ ID NO: 771, SEQ ID NO: 928, SEQ ID NO: 1085, SEQ ID NO: 1242, SEQ ID NO: 1399, and SEQ ID NO: 1556; SEQ ID NO: 772, SEQ ID NO: 929, SEQ ID NO: 1086, SEQ ID NO: 1243, SEQ ID NO: 1400, and SEQ ID NO: 1557; SEQ ID NO: 773, SEQ ID NO: 930, SEQ ID NO: 1087, SEQ ID NO: 1244, SEQ ID NO: 1401, and SEQ ID NO: 1558; SEQ ID NO: 774, SEQ ID NO: 931, SEQ ID NO: 1088, SEQ ID NO: 1245, SEQ ID NO: 1402, and SEQ ID NO: 1559; SEQ ID NO: 775, SEQ ID NO: 932, SEQ ID NO: 1089, SEQ ID NO: 1246, SEQ ID NO: 1403, and SEQ ID NO: 1560; SEQ ID NO: 776, SEQ ID NO: 933, SEQ ID NO: 1090, SEQ ID NO: 1247, SEQ ID NO: 1404, and SEQ ID NO: 1561; SEQ ID NO: 777, SEQ ID NO: 934, SEQ ID NO: 1091, SEQ ID NO: 1248, SEQ ID NO: 1405, and SEQ ID NO: 1562; SEQ ID NO: 778, SEQ ID NO: 935, SEQ ID NO: 1092, SEQ ID NO: 1249, SEQ ID NO: 1406, and SEQ ID NO: 1563; SEQ ID NO: 779, SEQ ID NO: 936, SEQ ID NO: 1093, SEQ ID NO: 1250, SEQ ID NO: 1407, and SEQ ID NO: 1564; SEQ ID NO: 780, SEQ ID NO: 937, SEQ ID NO: 1094, SEQ ID NO: 1251, SEQ ID NO: 1408, and SEQ ID NO: 1565; SEQ ID NO: 781, SEQ ID NO: 938, SEQ ID NO: 1095, SEQ ID NO: 1252, SEQ ID NO: 1409, and SEQ ID NO: 1566; SEQ ID NO: 782, SEQ ID NO: 939, SEQ ID NO: 1096, SEQ ID NO: 1253, SEQ ID NO: 1410, and SEQ ID NO: 1567; SEQ ID NO: 783, SEQ ID NO: 940, SEQ ID NO: 1097, SEQ ID NO: 1254, SEQ ID NO: 1411, and SEQ ID NO: 1568; SEQ ID NO: 784, SEQ ID NO: 941, SEQ ID NO: 1098, SEQ ID NO: 1255, SEQ ID NO: 1412, and SEQ ID NO: 1569; and SEQ ID NO: 785, SEQ ID NO: 942, SEQ ID NO: 1099, SEQ ID NO: 1256, SEQ ID NO: 1413, and SEQ ID NO: 1570.

15. The method of claim 6, wherein said antigen binding protein is an antibody or a fragment thereof, and wherein said antibody or fragment thereof comprises a light chain variable region comprising a sequence selected from the group consisting of SEQ ID NOs: 1-157 and a heavy chain variable region comprising a sequence selected from the group consisting of SEQ ID NOs: 158-314.

16. The method of claim 6, wherein said antigen binding protein is an antibody or a fragment thereof, and wherein said antibody or fragment thereof comprises a combination of a light chain variable region and a heavy chain variable region selected from the group consisting of a light chain variable region comprising SEQ ID NO: 1 and a heavy chain variable region comprising SEQ ID NO: 158; a light chain variable region comprising SEQ ID NO: 2 and a heavy chain variable region comprising SEQ ID NO: 159; a light chain variable region comprising SEQ ID NO: 3 and a heavy chain variable region comprising SEQ ID NO: 160; a light chain variable region comprising SEQ ID NO: 4 and a heavy chain variable region comprising SEQ ID NO: 161; a light chain variable region comprising SEQ ID NO: 5 and a heavy chain variable region comprising SEQ ID NO: 162; a light chain variable region comprising SEQ ID NO: 6 and a heavy chain variable region comprising SEQ ID NO: 163; a light chain variable region comprising SEQ ID NO: 7 and a heavy chain variable region comprising SEQ ID NO: 164; a light chain variable region comprising SEQ ID NO: 8 and a heavy chain variable region comprising SEQ ID NO: 165; a light chain variable region comprising SEQ ID NO: 9 and a heavy chain variable region comprising SEQ ID NO: 166; a light chain variable region comprising SEQ ID NO: 10 and a heavy chain variable region comprising SEQ ID NO: 167; a light chain variable region comprising SEQ ID NO: 11 and a heavy chain variable region comprising SEQ ID NO: 168; a light chain variable region comprising SEQ ID NO: 12 and a heavy chain variable region comprising SEQ ID NO: 169; a light chain variable region comprising SEQ ID NO: 13 and a heavy chain variable region comprising SEQ ID NO: 170; a light chain variable region comprising SEQ ID NO: 14 and a heavy chain variable region comprising SEQ ID NO: 171; a light chain variable region comprising SEQ ID NO: 15 and a heavy chain variable region comprising SEQ ID NO: 172; a light chain variable region comprising SEQ ID NO: 16 and a heavy chain variable region comprising SEQ ID NO: 173; a light chain variable region comprising SEQ ID NO: 17 and a heavy chain variable region comprising SEQ ID NO: 174; a light chain variable region comprising SEQ ID NO: 18 and a heavy chain variable region comprising SEQ ID NO: 175; a light chain variable region comprising SEQ ID NO: 19 and a heavy chain variable region comprising SEQ ID NO: 176; a light chain variable region comprising SEQ ID NO: 20 and a heavy chain variable region comprising SEQ ID NO: 177; a light chain variable region comprising SEQ ID NO: 21 and a heavy chain variable region comprising SEQ ID NO: 178; a light chain variable region comprising SEQ ID NO: 22 and a heavy chain variable region comprising SEQ ID NO: 179; a light chain variable region comprising SEQ ID NO: 23 and a heavy chain variable region comprising SEQ ID NO: 180; a light chain variable region comprising SEQ ID NO: 24 and a heavy chain variable region comprising SEQ ID NO: 181; a light chain variable region comprising SEQ ID NO: 25 and a heavy chain variable region comprising SEQ ID NO: 182; a light chain variable region comprising SEQ ID NO: 26 and a heavy chain variable region comprising SEQ ID NO: 183; a light chain variable region comprising SEQ ID NO: 27 and a heavy chain variable region comprising SEQ ID NO: 184; a light chain variable region comprising SEQ ID NO: 28 and a heavy chain variable region comprising SEQ ID NO: 185; a light chain variable region comprising SEQ ID NO: 29 and a heavy chain variable region comprising SEQ ID NO: 186; a light chain variable region comprising SEQ ID NO: 30 and a heavy chain variable region comprising SEQ ID NO: 187; a light chain variable region comprising SEQ ID NO: 31 and a heavy chain variable region comprising SEQ ID NO: 188; a light chain variable region comprising SEQ ID NO: 32 and a heavy chain variable region comprising SEQ ID NO: 189; a light chain variable region comprising SEQ ID NO: 33 and a heavy chain variable region comprising SEQ ID NO: 190; a light chain variable region comprising SEQ ID NO: 34 and a heavy chain variable region comprising SEQ ID NO: 191; a light chain variable region comprising SEQ ID NO: 35 and a heavy chain variable region comprising SEQ ID NO: 192; a light chain variable region comprising SEQ ID NO: 36 and a heavy chain variable region comprising SEQ ID NO: 193; a light chain variable region comprising SEQ ID NO: 37 and a heavy chain variable region comprising SEQ ID NO: 194; a light chain variable region comprising SEQ ID NO: 38 and a heavy chain variable region comprising SEQ ID NO: 195; a light chain variable region comprising SEQ ID NO: 39 and a heavy chain variable region comprising SEQ ID NO: 196; a light chain variable region comprising SEQ ID NO: 40 and a heavy chain variable region comprising SEQ ID NO: 197; a light chain variable region comprising SEQ ID NO: 41 and a heavy chain variable region comprising SEQ ID NO: 198; a light chain variable region comprising SEQ ID NO: 42 and a heavy chain variable region comprising SEQ ID NO: 199; a light chain variable region comprising SEQ ID NO: 43 and a heavy chain variable region comprising SEQ ID NO: 200; a light chain variable region comprising SEQ ID NO: 44 and a heavy chain variable region comprising SEQ ID NO: 201; a light chain variable region comprising SEQ ID NO: 45 and a heavy chain variable region comprising SEQ ID NO: 202; a light chain variable region comprising SEQ ID NO: 46 and a heavy chain variable region comprising SEQ ID NO: 203; a light chain variable region comprising SEQ ID NO: 47 and a heavy chain variable region comprising SEQ ID NO: 204; a light chain variable region comprising SEQ ID NO: 48 and a heavy chain variable region comprising SEQ ID NO: 205; a light chain variable region comprising SEQ ID NO: 49 and a heavy chain variable region comprising SEQ ID NO: 206; a light chain variable region comprising SEQ ID NO: 50 and a heavy chain variable region comprising SEQ ID NO: 207; a light chain variable region comprising SEQ ID NO: 51 and a heavy chain variable region comprising SEQ ID NO: 208; a light chain variable region comprising SEQ ID NO: 52 and a heavy chain variable region comprising SEQ ID NO: 209; a light chain variable region comprising SEQ ID NO: 53 and a heavy chain variable region comprising SEQ ID NO: 210; a light chain variable region comprising SEQ ID NO: 54 and a heavy chain variable region comprising SEQ ID NO: 211; a light chain variable region comprising SEQ ID NO: 55 and a heavy chain variable region comprising SEQ ID NO: 212; a light chain variable region comprising SEQ ID NO: 56 and a heavy chain variable region comprising SEQ ID NO: 213; a light chain variable region comprising SEQ ID NO: 57 and a heavy chain variable region comprising SEQ ID NO: 214; a light chain variable region comprising SEQ ID NO: 58 and a heavy chain variable region comprising SEQ ID NO: 215; a light chain variable region comprising SEQ ID NO: 59 and a heavy chain variable region comprising SEQ ID NO: 216; a light chain variable region comprising SEQ ID NO: 60 and a heavy chain variable region comprising SEQ ID NO: 217; a light chain variable region comprising SEQ ID NO: 61 and a heavy chain variable region comprising SEQ ID NO: 218; a light chain variable region comprising SEQ ID NO: 62 and a heavy chain variable region comprising SEQ ID NO: 219; a light chain variable region comprising SEQ ID NO: 63 and a heavy chain variable region comprising SEQ ID NO: 220; a light chain variable region comprising SEQ ID NO: 64 and a heavy chain variable region comprising SEQ ID NO: 221; a light chain variable region comprising SEQ ID NO: 65 and a heavy chain variable region comprising SEQ ID NO: 222; a light chain variable region comprising SEQ ID NO: 66 and a heavy chain variable region comprising SEQ ID NO: 223; a light chain variable region comprising SEQ ID NO: 67 and a heavy chain variable region comprising SEQ ID NO: 224; a light chain variable region comprising SEQ ID NO: 68 and a heavy chain variable region comprising SEQ ID NO: 225; a light chain variable region comprising SEQ ID NO: 69 and a heavy chain variable region comprising SEQ ID NO: 226; a light chain variable region comprising SEQ ID NO: 70 and a heavy chain variable region comprising SEQ ID NO: 227; a light chain variable region comprising SEQ ID NO: 71 and a heavy chain variable region comprising SEQ ID NO: 228; a light chain variable region comprising SEQ ID NO: 72 and a heavy chain variable region comprising SEQ ID NO: 229; a light chain variable region comprising SEQ ID NO: 73 and a heavy chain variable region comprising SEQ ID NO: 230; a light chain variable region comprising SEQ ID NO: 74 and a heavy chain variable region comprising SEQ ID NO: 231; a light chain variable region comprising SEQ ID NO: 75 and a heavy chain variable region comprising SEQ ID NO: 232; a light chain variable region comprising SEQ ID NO: 76 and a heavy chain variable region comprising SEQ ID NO: 233; a light chain variable region comprising SEQ ID NO: 77 and a heavy chain variable region comprising SEQ ID NO: 234; a light chain variable region comprising SEQ ID NO: 78 and a heavy chain variable region comprising SEQ ID NO: 235; a light chain variable region comprising SEQ ID NO: 79 and a heavy chain variable region comprising SEQ ID NO: 236; a light chain variable region comprising SEQ ID NO: 80 and a heavy chain variable region comprising SEQ ID NO: 237; a light chain variable region comprising SEQ ID NO: 81 and a heavy chain variable region comprising SEQ ID NO: 238; a light chain variable region comprising SEQ ID NO: 82 and a heavy chain variable region comprising SEQ ID NO: 239; a light chain variable region comprising SEQ ID NO: 83 and a heavy chain variable region comprising SEQ ID NO: 240; a light chain variable region comprising SEQ ID NO: 84 and a heavy chain variable region comprising SEQ ID NO: 241; a light chain variable region comprising SEQ ID NO: 85 and a heavy chain variable region comprising SEQ ID NO: 242; a light chain variable region comprising SEQ ID NO: 86 and a heavy chain variable region comprising SEQ ID NO: 243; a light chain variable region comprising SEQ ID NO: 87 and a heavy chain variable region comprising SEQ ID NO: 244; a light chain variable region comprising SEQ ID NO: 88 and a heavy chain variable region comprising SEQ ID NO: 245; a light chain variable region comprising SEQ ID NO: 89 and a heavy chain variable region comprising SEQ ID NO: 246; a light chain variable region comprising SEQ ID NO: 90 and a heavy chain variable region comprising SEQ ID NO: 247; a light chain variable region comprising SEQ ID NO: 91 and a heavy chain variable region comprising SEQ ID NO: 248; a light chain variable region comprising SEQ ID NO: 92 and a heavy chain variable region comprising SEQ ID NO: 249; a light chain variable region comprising SEQ ID NO: 93 and a heavy chain variable region comprising SEQ ID NO: 250; a light chain variable region comprising SEQ ID NO: 94 and a heavy chain variable region comprising SEQ ID NO: 251; a light chain variable region comprising SEQ ID NO: 95 and a heavy chain variable region comprising SEQ ID NO: 252; a light chain variable region comprising SEQ ID NO: 96 and a heavy chain variable region comprising SEQ ID NO: 253; a light chain variable region comprising SEQ ID NO: 97 and a heavy chain variable region comprising SEQ ID NO: 254; a light chain variable region comprising SEQ ID NO: 98 and a heavy chain variable region comprising SEQ ID NO: 255; a light chain variable region comprising SEQ ID NO: 99 and a heavy chain variable region comprising SEQ ID NO: 256; a light chain variable region comprising SEQ ID NO: 100 and a heavy chain variable region comprising SEQ ID NO: 257; a light chain variable region comprising SEQ ID NO: 101 and a heavy chain variable region comprising SEQ ID NO: 258; a light chain variable region comprising SEQ ID NO: 102 and a heavy chain variable region comprising SEQ ID NO: 259; a light chain variable region comprising SEQ ID NO: 103 and a heavy chain variable region comprising SEQ ID NO: 260; a light chain variable region comprising SEQ ID NO: 104 and a heavy chain variable region comprising SEQ ID NO: 261; a light chain variable region comprising SEQ ID NO: 105 and a heavy chain variable region comprising SEQ ID NO: 262; a light chain variable region comprising SEQ ID NO: 106 and a heavy chain variable region comprising SEQ ID NO: 263; a light chain variable region comprising SEQ ID NO: 107 and a heavy chain variable region comprising SEQ ID NO: 264; a light chain variable region comprising SEQ ID NO: 108 and a heavy chain variable region comprising SEQ ID NO: 265; a light chain variable region comprising SEQ ID NO: 109 and a heavy chain variable region comprising SEQ ID NO: 266; a light chain variable region comprising SEQ ID NO: 110 and a heavy chain variable region comprising SEQ ID NO: 267; a light chain variable region comprising SEQ ID NO: 111 and a heavy chain variable region comprising SEQ ID NO: 268; a light chain variable region comprising SEQ ID NO: 112 and a heavy chain variable region comprising SEQ ID NO: 269; a light chain variable region comprising SEQ ID NO: 113 and a heavy chain variable region comprising SEQ ID NO: 270; a light chain variable region comprising SEQ ID NO: 114 and a heavy chain variable region comprising SEQ ID NO: 271; a light chain variable region comprising SEQ ID NO: 115 and a heavy chain variable region comprising SEQ ID NO: 272; a light chain variable region comprising SEQ ID NO: 116 and a heavy chain variable region comprising SEQ ID NO: 273; a light chain variable region comprising SEQ ID NO: 117 and a heavy chain variable region comprising SEQ ID NO: 274; a light chain variable region comprising SEQ ID NO: 118 and a heavy chain variable region comprising SEQ ID NO: 275; a light chain variable region comprising SEQ ID NO: 119 and a heavy chain variable region comprising SEQ ID NO: 276; a light chain variable region comprising SEQ ID NO: 120 and a heavy chain variable region comprising SEQ ID NO: 277; a light chain variable region comprising SEQ ID NO: 121 and a heavy chain variable region comprising SEQ ID NO: 278; a light chain variable region comprising SEQ ID NO: 122 and a heavy chain variable region comprising SEQ ID NO: 279; a light chain variable region comprising SEQ ID NO: 123 and a heavy chain variable region comprising SEQ ID NO: 280; a light chain variable region comprising SEQ ID NO: 124 and a heavy chain variable region comprising SEQ ID NO: 281; a light chain variable region comprising SEQ ID NO: 125 and a heavy chain variable region comprising SEQ ID NO: 282; a light chain variable region comprising SEQ ID NO: 126 and a heavy chain variable region comprising SEQ ID NO: 283; a light chain variable region comprising SEQ ID NO: 127 and a heavy chain variable region comprising SEQ ID NO: 284; a light chain variable region comprising SEQ ID NO: 128 and a heavy chain variable region comprising SEQ ID NO: 285; a light chain variable region comprising SEQ ID NO: 129 and a heavy chain variable region comprising SEQ ID NO: 286; a light chain variable region comprising SEQ ID NO: 130 and a heavy chain variable region comprising SEQ ID NO: 287; a light chain variable region comprising SEQ ID NO: 131 and a heavy chain variable region comprising SEQ ID NO: 288; a light chain variable region comprising SEQ ID NO: 132 and a heavy chain variable region comprising SEQ ID NO: 289; a light chain variable region comprising SEQ ID NO: 133 and a heavy chain variable region comprising SEQ ID NO: 290; a light chain variable region comprising SEQ ID NO: 134 and a heavy chain variable region comprising SEQ ID NO: 291; a light chain variable region comprising SEQ ID NO: 135 and a heavy chain variable region comprising SEQ ID NO: 292; a light chain variable region comprising SEQ ID NO: 136 and a heavy chain variable region comprising SEQ ID NO: 293; a light chain variable region comprising SEQ ID NO: 137 and a heavy chain variable region comprising SEQ ID NO: 294; a light chain variable region comprising SEQ ID NO: 138 and a heavy chain variable region comprising SEQ ID NO: 295; a light chain variable region comprising SEQ ID NO: 139 and a heavy chain variable region comprising SEQ ID NO: 296; a light chain variable region comprising SEQ ID NO: 140 and a heavy chain variable region comprising SEQ ID NO: 297; a light chain variable region comprising SEQ ID NO: 141 and a heavy chain variable region comprising SEQ ID NO: 298; a light chain variable region comprising SEQ ID NO: 142 and a heavy chain variable region comprising SEQ ID NO: 299; a light chain variable region comprising SEQ ID NO: 143 and a heavy chain variable region comprising SEQ ID NO: 300; a light chain variable region comprising SEQ ID NO: 144 and a heavy chain variable region comprising SEQ ID NO: 301; a light chain variable region comprising SEQ ID NO: 145 and a heavy chain variable region comprising SEQ ID NO: 302; a light chain variable region comprising SEQ ID NO: 146 and a heavy chain variable region comprising SEQ ID NO: 303; a light chain variable region comprising SEQ ID NO: 147 and a heavy chain variable region comprising SEQ ID NO: 304; a light chain variable region comprising SEQ ID NO: 148 and a heavy chain variable region comprising SEQ ID NO: 305; a light chain variable region comprising SEQ ID NO: 149 and a heavy chain variable region comprising SEQ ID NO: 306; a light chain variable region comprising SEQ ID NO: 150 and a heavy chain variable region comprising SEQ ID NO: 307; a light chain variable region comprising SEQ ID NO: 151 and a heavy chain variable region comprising SEQ ID NO: 308; a light chain variable region comprising SEQ ID NO: 152 and a heavy chain variable region comprising SEQ ID NO: 309; a light chain variable region comprising SEQ ID NO: 153 and a heavy chain variable region comprising SEQ ID NO: 310; a light chain variable region comprising SEQ ID NO: 154 and a heavy chain variable region comprising SEQ ID NO: 311; a light chain variable region comprising SEQ ID NO: 155 and a heavy chain variable region comprising SEQ ID NO: 312; a light chain variable region comprising SEQ ID NO: 156 and a heavy chain variable region comprising SEQ ID NO: 313; and a light chain variable region comprising SEQ ID NO: 157 and a heavy chain variable region comprising SEQ ID NO: 314.

17. The isolated antigen binding protein of claim 21, wherein said antigen binding protein is an antibody, and wherein said antibody comprises a light chain comprising a sequence selected from the group consisting of SEQ ID NOs: 472-628 and a heavy chain comprising a sequence selected from the group consisting of SEQ ID NOs: 472-628.

18. The method of claim 6, wherein said antigen binding protein is an antibody, and wherein said antibody comprises a combination of a light chain and a heavy chain selected from the group consisting of a light chain comprising SEQ ID NO: 315 and a heavy chain comprising SEQ ID NO: 472; a light chain comprising SEQ ID NO: 316 and a heavy chain comprising SEQ ID NO: 473; a light chain comprising SEQ ID NO: 317 and a heavy chain comprising SEQ ID NO: 474; a light chain comprising SEQ ID NO: 318 and a heavy chain comprising SEQ ID NO: 475; a light chain comprising SEQ ID NO: 319 and a heavy chain comprising SEQ ID NO: 476; a light chain comprising SEQ ID NO: 320 and a heavy chain comprising SEQ ID NO: 477; a light chain comprising SEQ ID NO: 321 and a heavy chain comprising SEQ ID NO: 478; a light chain comprising SEQ ID NO: 322 and a heavy chain comprising SEQ ID NO: 479; a light chain comprising SEQ ID NO: 323 and a heavy chain comprising SEQ ID NO: 480; a light chain comprising SEQ ID NO: 324 and a heavy chain comprising SEQ ID NO: 481; a light chain comprising SEQ ID NO: 325 and a heavy chain comprising SEQ ID NO: 482; a light chain comprising SEQ ID NO: 326 and a heavy chain comprising SEQ ID NO: 483; a light chain comprising SEQ ID NO: 327 and a heavy chain comprising SEQ ID NO: 484; a light chain comprising SEQ ID NO: 328 and a heavy chain comprising SEQ ID NO: 485; a light chain comprising SEQ ID NO: 329 and a heavy chain comprising SEQ ID NO: 486; a light chain comprising SEQ ID NO: 330 and a heavy chain comprising SEQ ID NO: 487; a light chain comprising SEQ ID NO: 331 and a heavy chain comprising SEQ ID NO: 488; a light chain comprising SEQ ID NO: 332 and a heavy chain comprising SEQ ID NO: 489; a light chain comprising SEQ ID NO: 333 and a heavy chain comprising SEQ ID NO: 490; a light chain comprising SEQ ID NO: 334 and a heavy chain comprising SEQ ID NO: 491; a light chain comprising SEQ ID NO: 335 and a heavy chain comprising SEQ ID NO: 492; a light chain comprising SEQ ID NO: 336 and a heavy chain comprising SEQ ID NO: 493; a light chain comprising SEQ ID NO: 337 and a heavy chain comprising SEQ ID NO: 494; a light chain comprising SEQ ID NO: 338 and a heavy chain comprising SEQ ID NO: 495; a light chain comprising SEQ ID NO: 339 and a heavy chain comprising SEQ ID NO: 496; a light chain comprising SEQ ID NO: 340 and a heavy chain comprising SEQ ID NO: 497; a light chain comprising SEQ ID NO: 341 and a heavy chain comprising SEQ ID NO: 498; a light chain comprising SEQ ID NO: 342 and a heavy chain comprising SEQ ID NO: 499; a light chain comprising SEQ ID NO: 343 and a heavy chain comprising SEQ ID NO: 500; a light chain comprising SEQ ID NO: 344 and a heavy chain comprising SEQ ID NO: 501; a light chain comprising SEQ ID NO: 345 and a heavy chain comprising SEQ ID NO: 502; a light chain comprising SEQ ID NO: 346 and a heavy chain comprising SEQ ID NO: 503; a light chain comprising SEQ ID NO: 347 and a heavy chain comprising SEQ ID NO: 504; a light chain comprising SEQ ID NO: 348 and a heavy chain comprising SEQ ID NO: 505; a light chain comprising SEQ ID NO: 349 and a heavy chain comprising SEQ ID NO: 506; a light chain comprising SEQ ID NO: 350 and a heavy chain comprising SEQ ID NO: 507; a light chain comprising SEQ ID NO: 351 and a heavy chain comprising SEQ ID NO: 508; a light chain comprising SEQ ID NO: 352 and a heavy chain comprising SEQ ID NO: 509; a light chain comprising SEQ ID NO: 353 and a heavy chain comprising SEQ ID NO: 510; a light chain comprising SEQ ID NO: 354 and a heavy chain comprising SEQ ID NO: 511; a light chain comprising SEQ ID NO: 355 and a heavy chain comprising SEQ ID NO: 512; a light chain comprising SEQ ID NO: 356 and a heavy chain comprising SEQ ID NO: 513; a light chain comprising SEQ ID NO: 357 and a heavy chain comprising SEQ ID NO: 514; a light chain comprising SEQ ID NO: 358 and a heavy chain comprising SEQ ID NO: 515; a light chain comprising SEQ ID NO: 359 and a heavy chain comprising SEQ ID NO: 516; a light chain comprising SEQ ID NO: 360 and a heavy chain comprising SEQ ID NO: 517; a light chain comprising SEQ ID NO: 361 and a heavy chain comprising SEQ ID NO: 518; a light chain comprising SEQ ID NO: 362 and a heavy chain comprising SEQ ID NO: 519; a light chain comprising SEQ ID NO: 363 and a heavy chain comprising SEQ ID NO: 520; a light chain comprising SEQ ID NO: 364 and a heavy chain comprising SEQ ID NO: 521; a light chain comprising SEQ ID NO: 365 and a heavy chain comprising SEQ ID NO: 522; a light chain comprising SEQ ID NO: 366 and a heavy chain comprising SEQ ID NO: 523; a light chain comprising SEQ ID NO: 367 and a heavy chain comprising SEQ ID NO: 524; a light chain comprising SEQ ID NO: 368 and a heavy chain comprising SEQ ID NO: 525; a light chain comprising SEQ ID NO: 369 and a heavy chain comprising SEQ ID NO: 526; a light chain comprising SEQ ID NO: 370 and a heavy chain comprising SEQ ID NO: 527; a light chain comprising SEQ ID NO: 371 and a heavy chain comprising SEQ ID NO: 528; a light chain comprising SEQ ID NO: 372 and a heavy chain comprising SEQ ID NO: 529; a light chain comprising SEQ ID NO: 373 and a heavy chain comprising SEQ ID NO: 530; a light chain comprising SEQ ID NO: 374 and a heavy chain comprising SEQ ID NO: 531; a light chain comprising SEQ ID NO: 375 and a heavy chain comprising SEQ ID NO: 532; a light chain comprising SEQ ID NO: 376 and a heavy chain comprising SEQ ID NO: 533; a light chain comprising SEQ ID NO: 377 and a heavy chain comprising SEQ ID NO: 534; a light chain comprising SEQ ID NO: 378 and a heavy chain comprising SEQ ID NO: 535; a light chain comprising SEQ ID NO: 379 and a heavy chain comprising SEQ ID NO: 536; a light chain comprising SEQ ID NO: 380 and a heavy chain comprising SEQ ID NO: 537; a light chain comprising SEQ ID NO: 381 and a heavy chain comprising SEQ ID NO: 538; a light chain comprising SEQ ID NO: 382 and a heavy chain comprising SEQ ID NO: 539; a light chain comprising SEQ ID NO: 383 and a heavy chain comprising SEQ ID NO: 540; a light chain comprising SEQ ID NO: 384 and a heavy chain comprising SEQ ID NO: 541; a light chain comprising SEQ ID NO: 385 and a heavy chain comprising SEQ ID NO: 542; a light chain comprising SEQ ID NO: 386 and a heavy chain comprising SEQ ID NO: 543; a light chain comprising SEQ ID NO: 387 and a heavy chain comprising SEQ ID NO: 544; a light chain comprising SEQ ID NO: 388 and a heavy chain comprising SEQ ID NO: 545; a light chain comprising SEQ ID NO: 389 and a heavy chain comprising SEQ ID NO: 546; a light chain comprising SEQ ID NO: 390 and a heavy chain comprising SEQ ID NO: 547; a light chain comprising SEQ ID NO: 391 and a heavy chain comprising SEQ ID NO: 548; a light chain comprising SEQ ID NO: 392 and a heavy chain comprising SEQ ID NO: 549; a light chain comprising SEQ ID NO: 393 and a heavy chain comprising SEQ ID NO: 550; a light chain comprising SEQ ID NO: 394 and a heavy chain comprising SEQ ID NO: 551; a light chain comprising SEQ ID NO: 395 and a heavy chain comprising SEQ ID NO: 552; a light chain comprising SEQ ID NO: 396 and a heavy chain comprising SEQ ID NO: 553; a light chain comprising SEQ ID NO: 397 and a heavy chain comprising SEQ ID NO: 554; a light chain comprising SEQ ID NO: 398 and a heavy chain comprising SEQ ID NO: 555; a light chain comprising SEQ ID NO: 399 and a heavy chain comprising SEQ ID NO: 556; a light chain comprising SEQ ID NO: 400 and a heavy chain comprising SEQ ID NO: 557; a light chain comprising SEQ ID NO: 401 and a heavy chain comprising SEQ ID NO: 558; a light chain comprising SEQ ID NO: 402 and a heavy chain comprising SEQ ID NO: 559; a light chain comprising SEQ ID NO: 403 and a heavy chain comprising SEQ ID NO: 560; a light chain comprising SEQ ID NO: 404 and a heavy chain comprising SEQ ID NO: 561; a light chain comprising SEQ ID NO: 405 and a heavy chain comprising SEQ ID NO: 562; a light chain comprising SEQ ID NO: 406 and a heavy chain comprising SEQ ID NO: 563; a light chain comprising SEQ ID NO: 407 and a heavy chain comprising SEQ ID NO: 564; a light chain comprising SEQ ID NO: 408 and a heavy chain comprising SEQ ID NO: 565; a light chain comprising SEQ ID NO: 409 and a heavy chain comprising SEQ ID NO: 566; a light chain comprising SEQ ID NO: 410 and a heavy chain comprising SEQ ID NO: 567; a light chain comprising SEQ ID NO: 411 and a heavy chain comprising SEQ ID NO: 568; a light chain comprising SEQ ID NO: 412 and a heavy chain comprising SEQ ID NO: 569; a light chain comprising SEQ ID NO: 413 and a heavy chain comprising SEQ ID NO: 570; a light chain comprising SEQ ID NO: 414 and a heavy chain comprising SEQ ID NO: 571; a light chain comprising SEQ ID NO: 415 and a heavy chain comprising SEQ ID NO: 572; a light chain comprising SEQ ID NO: 416 and a heavy chain comprising SEQ ID NO: 573; a light chain comprising SEQ ID NO: 417 and a heavy chain comprising SEQ ID NO: 574; a light chain comprising SEQ ID NO: 418 and a heavy chain comprising SEQ ID NO: 575; a light chain comprising SEQ ID NO: 419 and a heavy chain comprising SEQ ID NO: 576; a light chain comprising SEQ ID NO: 420 and a heavy chain comprising SEQ ID NO: 577; a light chain comprising SEQ ID NO: 421 and a heavy chain comprising SEQ ID NO: 578; a light chain comprising SEQ ID NO: 422 and a heavy chain comprising SEQ ID NO: 579; a light chain comprising SEQ ID NO: 423 and a heavy chain comprising SEQ ID NO: 580; a light chain comprising SEQ ID NO: 424 and a heavy chain comprising SEQ ID NO: 581; a light chain comprising SEQ ID NO: 425 and a heavy chain comprising SEQ ID NO: 582; a light chain comprising SEQ ID NO: 426 and a heavy chain comprising SEQ ID NO: 583; a light chain comprising SEQ ID NO: 427 and a heavy chain comprising SEQ ID NO: 584; a light chain comprising SEQ ID NO: 428 and a heavy chain comprising SEQ ID NO: 585; a light chain comprising SEQ ID NO: 429 and a heavy chain comprising SEQ ID NO: 586; a light chain comprising SEQ ID NO: 430 and a heavy chain comprising SEQ ID NO: 587; a light chain comprising SEQ ID NO: 431 and a heavy chain comprising SEQ ID NO: 588; a light chain comprising SEQ ID NO: 432 and a heavy chain comprising SEQ ID NO: 589; a light chain comprising SEQ ID NO: 433 and a heavy chain comprising SEQ ID NO: 590; a light chain comprising SEQ ID NO: 434 and a heavy chain comprising SEQ ID NO: 591; a light chain comprising SEQ ID NO: 435 and a heavy chain comprising SEQ ID NO: 592; a light chain comprising SEQ ID NO: 436 and a heavy chain comprising SEQ ID NO: 593; a light chain comprising SEQ ID NO: 437 and a heavy chain comprising SEQ ID NO: 594; a light chain comprising SEQ ID NO: 438 and a heavy chain comprising SEQ ID NO: 595; a light chain comprising SEQ ID NO: 439 and a heavy chain comprising SEQ ID NO: 596; a light chain comprising SEQ ID NO: 440 and a heavy chain comprising SEQ ID NO: 597; a light chain comprising SEQ ID NO: 441 and a heavy chain comprising SEQ ID NO: 598; a light chain comprising SEQ ID NO: 442 and a heavy chain comprising SEQ ID NO: 599; a light chain comprising SEQ ID NO: 443 and a heavy chain comprising SEQ ID NO: 600; a light chain comprising SEQ ID NO: 444 and a heavy chain comprising SEQ ID NO: 601; a light chain comprising SEQ ID NO: 445 and a heavy chain comprising SEQ ID NO: 602; a light chain comprising SEQ ID NO: 446 and a heavy chain comprising SEQ ID NO: 603; a light chain comprising SEQ ID NO: 447 and a heavy chain comprising SEQ ID NO: 604; a light chain comprising SEQ ID NO: 448 and a heavy chain comprising SEQ ID NO: 605; a light chain comprising SEQ ID NO: 449 and a heavy chain comprising SEQ ID NO: 606; a light chain comprising SEQ ID NO: 450 and a heavy chain comprising SEQ ID NO: 607; a light chain comprising SEQ ID NO: 451 and a heavy chain comprising SEQ ID NO: 608; a light chain comprising SEQ ID NO: 452 and a heavy chain comprising SEQ ID NO: 609; a light chain comprising SEQ ID NO: 453 and a heavy chain comprising SEQ ID NO: 610; a light chain comprising SEQ ID NO: 454 and a heavy chain comprising SEQ ID NO: 611; a light chain comprising SEQ ID NO: 455 and a heavy chain comprising SEQ ID NO: 612; a light chain comprising SEQ ID NO: 456 and a heavy chain comprising SEQ ID NO: 613; a light chain comprising SEQ ID NO: 457 and a heavy chain comprising SEQ ID NO: 614; a light chain comprising SEQ ID NO: 458 and a heavy chain comprising SEQ ID NO: 615; a light chain comprising SEQ ID NO: 459 and a heavy chain comprising SEQ ID NO: 616; a light chain comprising SEQ ID NO: 460 and a heavy chain comprising SEQ ID NO: 617; a light chain comprising SEQ ID NO: 461 and a heavy chain comprising SEQ ID NO: 618; a light chain comprising SEQ ID NO: 462 and a heavy chain comprising SEQ ID NO: 619; a light chain comprising SEQ ID NO: 463 and a heavy chain comprising SEQ ID NO: 620; a light chain comprising SEQ ID NO: 464 and a heavy chain comprising SEQ ID NO: 621; a light chain comprising SEQ ID NO: 465 and a heavy chain comprising SEQ ID NO: 622; a light chain comprising SEQ ID NO: 466 and a heavy chain comprising SEQ ID NO: 623; a light chain comprising SEQ ID NO: 467 and a heavy chain comprising SEQ ID NO: 624; a light chain comprising SEQ ID NO: 468 and a heavy chain comprising SEQ ID NO: 625; a light chain comprising SEQ ID NO: 469 and a heavy chain comprising SEQ ID NO: 626; a light chain comprising SEQ ID NO: 470 and a heavy chain comprising SEQ ID NO: 627; and a light chain comprising SEQ ID NO: 471 and a heavy chain comprising SEQ ID NO: 628.

19. The isolated antigen binding protein of claim 6, wherein said antigen binding protein is an antibody or a fragment thereof, and wherein said antibody comprises a CDRL1, a CDRL2, a CDRL3, a CDRH1, a CDRH2, and a CDRH3, wherein said CDRL1 comprises a sequence selected from the group consisting of SEQ ID NOs: a4, a10, a16, a22, a28, a34, a40, a46, a52, a58, a64, a70, a76, a82, a88, a94, a100, a106, a112, a118, a124, a130, a136, a142, a148, a154, a160, a166, a172, a178, a184, a190, a196, a202, a208, a214, a220, a226, a232, a238, a244, a250, a256, a262, a268, a274, a280, a286, a292, a298, a304, a310, a316, a322, a328, a334, a340, a346, a352, a358, a1290, a1300, a1310, a1320, a1330, a1340, and a1350; said CDRL2 comprises a sequence selected from the group consisting of SEQ ID NOs: a5, a11, a17, a23, a29, a35, a41, a47, a53, a59, a65, a71, a77, a83, a89, a95, a101, a107, a113, a119, a125, a131, a137, a143, a149, a155, a161, a167, a173, a179, a185, a191, a197, a203, a209, a215, a221, a227, a233, a239, a245, a251, a257, a263, a269, a275, a281, a287, a293, a299, a305, a311, a317, a323, a329, a335, a341, a347, a353, a359, a1291, a1301, a1311, a1321, a1331, a1341, and a1351; said CDRL3 comprises a sequence selected from the group consisting of SEQ ID NOs: a6, a12, a18, a24, a30, a36, a42, a48, a54, a60, a66, a72, a78, a84, a90, a96, a102, a108, a114, a120, a126, a132, a138, a144, a150, a156, a162, a168, a174, a180, a186, a192, a198, a204, a210, a216, a222, a228, a234, a240, a246, a252, a258, a264, a270, a276, a282, a288, a294, a300, a306, a312, a318, a324, a330, a336, a342, a348, a354, a360, a1292, a1302, a1312, a1322, a1332, a1342, and a1352; said CDRH1 comprises a sequence selected from the group consisting of SEQ ID NOs: a364, a370, a376, a382, a388, a394, a400, a406, a412, a418, a424, a430, a436, a442, a448, a454, a460, a466, a472, a478, a484, a490, a496, a502, a508, a514, a520, a526, a532, a538, a544, a550, a556, a562, a568, a574, a580, a586, a592, a598, a604, a610, a616, a622, a628, a634, a640, a646, a652, a658, a664, a670, a676, a682, a688, a694, a700, a706, a712, a718, a1293, a1303, a1313, a1323, a1333, a1343, and a1353; said CDRH2 comprises a sequence selected from the group consisting of SEQ ID NOs: a365, a371, a377, a383, a389, a395, a401, a407, a413, a419, a425, a431, a437, a443, a449, a455, a461, a467, a473, a479, a485, a491, a497, a503, a509, a515, a521, a527, a533, a539, a545, a551, a557, a563, a569, a575, a581, a587, a593, a599, a605, a611, a617, a623, a629, a635, a641, a647, a653, a659, a665, a671, a677, a683, a689, a695, a701, a707, a713, a719, a1294, a1304, a1314, a1324, a1334, a1344, and a1354; and said CDRH3 comprises a sequence selected from the group consisting of SEQ ID NOs: a366, a372, a378, a384, a390, a396, a402, a408, a414, a420, a426, a432, a438, a444, a450, a456, a462, a468, a474, a480, a486, a492, a498, a504, a510, a516, a522, a528, a534, a540, a546, a552, a558, a564, a570, a576, a582, a588, a594, a600, a606, a612, a618, a624, a630, a636, a642, a648, a654, a660, a666, a672, a678, a684, a690, a696, a702, a708, a714, a720, a1295, a1305, a1315, a1325, a1335, a1345, and a1355.

20. The isolated antigen binding protein of claim 6, wherein said antigen binding protein is an antibody or a fragment thereof, and wherein said antibody comprises a CDRL1, a CDRL2, a CDRL3, a CDRH1, a CDRH2, and a CDRH3, wherein each CDRL1, CDRL2, CDRL3, CDRH1, CDRH2, and CDRH3, respectively, comprises a sequence selected from the group consisting of SEQ ID NO: a4, SEQ ID NO: a5, SEQ ID NO: a6, SEQ ID NO: a364, SEQ ID NO: a365, and SEQ ID NO: a366; SEQ ID NO: a10, SEQ ID NO: all, SEQ ID NO: a12, SEQ ID NO: a370, SEQ ID NO: a371, and SEQ ID NO: a372; SEQ ID NO: a16, SEQ ID NO: a17, SEQ ID NO: a18, SEQ ID NO: a376, SEQ ID NO: a377, and SEQ ID NO: a378; SEQ ID NO: a22, SEQ ID NO: a23, SEQ ID NO: a24, SEQ ID NO: a382, SEQ ID NO: a383, and SEQ ID NO: a384; SEQ ID NO: a28, SEQ ID NO: a29, SEQ ID NO: a30, SEQ ID NO: a388, SEQ ID NO: a389, and SEQ ID NO: a390; SEQ ID NO: a34, SEQ ID NO: a35, SEQ ID NO: a36, SEQ ID NO: a394, SEQ ID NO: a395, and SEQ ID NO: a396; SEQ ID NO: a40, SEQ ID NO: a41, SEQ ID NO: a42, SEQ ID NO: a400, SEQ ID NO: a401, and SEQ ID NO: a402; SEQ ID NO: a46, SEQ ID NO: a47, SEQ ID NO: a48, SEQ ID NO: a406, SEQ ID NO: a407, and SEQ ID NO: a408; SEQ ID NO: a52, SEQ ID NO: a53, SEQ ID NO: a54, SEQ ID NO: a412, SEQ ID NO: a413, and SEQ ID NO: a414; SEQ ID NO: a58, SEQ ID NO: a59, SEQ ID NO: a60, SEQ ID NO: a418, SEQ ID NO: a419, and SEQ ID NO: a420; SEQ ID NO: a64, SEQ ID NO: a65, SEQ ID NO: a66, SEQ ID NO: a424, SEQ ID NO: a425, and SEQ ID NO: a426; SEQ ID NO: a70, SEQ ID NO: a71, SEQ ID NO: a72, SEQ ID NO: a430, SEQ ID NO: a431, and SEQ ID NO: a432; SEQ ID NO: a76, SEQ ID NO: a77, SEQ ID NO: a78, SEQ ID NO: a436, SEQ ID NO: a437, and SEQ ID NO: a438; SEQ ID NO: a82, SEQ ID NO: a83, SEQ ID NO: a84, SEQ ID NO: a442, SEQ ID NO: a443, and SEQ ID NO: a444; SEQ ID NO: a88, SEQ ID NO: a89, SEQ ID NO: a90, SEQ ID NO: a448, SEQ ID NO: a449, and SEQ ID NO: a450; SEQ ID NO: a94, SEQ ID NO: a95, SEQ ID NO: a96, SEQ ID NO: a454, SEQ ID NO: a455, and SEQ ID NO: a456; SEQ ID NO: a100, SEQ ID NO: a101, SEQ ID NO: a102, SEQ ID NO: a460, SEQ ID NO: a461, and SEQ ID NO: a462; SEQ ID NO: a106, SEQ ID NO: a107, SEQ ID NO: a108, SEQ ID NO: a466, SEQ ID NO: a467, and SEQ ID NO: a468; SEQ ID NO: a112, SEQ ID NO: a113, SEQ ID NO: a114, SEQ ID NO: a472, SEQ ID NO: a473, and SEQ ID NO: a474; SEQ ID NO: a118, SEQ ID NO: a119, SEQ ID NO: a120, SEQ ID NO: a478, SEQ ID NO: a479, and SEQ ID NO: a480; SEQ ID NO: a124, SEQ ID NO: a125, SEQ ID NO: a126, SEQ ID NO: a484, SEQ ID NO: a485, and SEQ ID NO: a486; SEQ ID NO: a130, SEQ ID NO: a131, SEQ ID NO: a132, SEQ ID NO: a490, SEQ ID NO: a491, and SEQ ID NO: a492; SEQ ID NO: a136, SEQ ID NO: a137, SEQ ID NO: a138, SEQ ID NO: a496, SEQ ID NO: a497, and SEQ ID NO: a498; SEQ ID NO: a142, SEQ ID NO: a143, SEQ ID NO: a144, SEQ ID NO: a502, SEQ ID NO: a503, and SEQ ID NO: a504; SEQ ID NO: a148, SEQ ID NO: a149, SEQ ID NO: a150, SEQ ID NO: a508, SEQ ID NO: a509, and SEQ ID NO: a510; SEQ ID NO: a154, SEQ ID NO: a155, SEQ ID NO: a156, SEQ ID NO: a514, SEQ ID NO: a515, and SEQ ID NO: a516; SEQ ID NO: a160, SEQ ID NO: a161, SEQ ID NO: a162, SEQ ID NO: a520, SEQ ID NO: a521, and SEQ ID NO: a522; SEQ ID NO: a166, SEQ ID NO: a167, SEQ ID NO: a168, SEQ ID NO: a526, SEQ ID NO: a527, and SEQ ID NO: a528; SEQ ID NO: a172, SEQ ID NO: a173, SEQ ID NO: a174, SEQ ID NO: a532, SEQ ID NO: a533, and SEQ ID NO: a534; SEQ ID NO: a178, SEQ ID NO: a179, SEQ ID NO: a180, SEQ ID NO: a538, SEQ ID NO: a539, and SEQ ID NO: a540; SEQ ID NO: a184, SEQ ID NO: a185, SEQ ID NO: a186, SEQ ID NO: a544, SEQ ID NO: a545, and SEQ ID NO: a546; SEQ ID NO: a190, SEQ ID NO: a191, SEQ ID NO: a192, SEQ ID NO: a550, SEQ ID NO: a551, and SEQ ID NO: a552; SEQ ID NO: a196, SEQ ID NO: a197, SEQ ID NO: a198, SEQ ID NO: a556, SEQ ID NO: a557, and SEQ ID NO: a558; SEQ ID NO: a202, SEQ ID NO: a203, SEQ ID NO: a204, SEQ ID NO: a562, SEQ ID NO: a563, and SEQ ID NO: a564; SEQ ID NO: a208, SEQ ID NO: a209, SEQ ID NO: a210, SEQ ID NO: a568, SEQ ID NO: a569, and SEQ ID NO: a570; SEQ ID NO: a214, SEQ ID NO: a215, SEQ ID NO: a216, SEQ ID NO: a574, SEQ ID NO: a575, and SEQ ID NO: a576; SEQ ID NO: a220, SEQ ID NO: a221, SEQ ID NO: a222, SEQ ID NO: a580, SEQ ID NO: a581, and SEQ ID NO: a582; SEQ ID NO: a226, SEQ ID NO: a227, SEQ ID NO: a228, SEQ ID NO: a586, SEQ ID NO: a587, and SEQ ID NO: a588; SEQ ID NO: a232, SEQ ID NO: a233, SEQ ID NO: a234, SEQ ID NO: a592, SEQ ID NO: a593, and SEQ ID NO: a594; SEQ ID NO: a238, SEQ ID NO: a239, SEQ ID NO: a240, SEQ ID NO: a598, SEQ ID NO: a599, and SEQ ID NO: a600; SEQ ID NO: a244, SEQ ID NO: a245, SEQ ID NO: a246, SEQ ID NO: a604, SEQ ID NO: a605, and SEQ ID NO: a606; SEQ ID NO: a250, SEQ ID NO: a251, SEQ ID NO: a252, SEQ ID NO: a610, SEQ ID NO: a611, and SEQ ID NO: a612; SEQ ID NO: a256, SEQ ID NO: a257, SEQ ID NO: a258, SEQ ID NO: a616, SEQ ID NO: a617, and SEQ ID NO: a618; SEQ ID NO: a262, SEQ ID NO: a263, SEQ ID NO: a264, SEQ ID NO: a622, SEQ ID NO: a623, and SEQ ID NO: a624; SEQ ID NO: a268, SEQ ID NO: a269, SEQ ID NO: a270, SEQ ID NO: a628, SEQ ID NO: a629, and SEQ ID NO: a630; SEQ ID NO: a274, SEQ ID NO: a275, SEQ ID NO: a276, SEQ ID NO: a634, SEQ ID NO: a635, and SEQ ID NO: a636; SEQ ID NO: a280, SEQ ID NO: a281, SEQ ID NO: a282, SEQ ID NO: a640, SEQ ID NO: a641, and SEQ ID NO: a642; SEQ ID NO: a286, SEQ ID NO: a287, SEQ ID NO: a288, SEQ ID NO: a646, SEQ ID NO: a647, and SEQ ID NO: a648; SEQ ID NO: a292, SEQ ID NO: a293, SEQ ID NO: a294, SEQ ID NO: a652, SEQ ID NO: a653, and SEQ ID NO: a654; SEQ ID NO: a298, SEQ ID NO: a299, SEQ ID NO: a300, SEQ ID NO: a658, SEQ ID NO: a659, and SEQ ID NO: a660; SEQ ID NO: a304, SEQ ID NO: a305, SEQ ID NO: a306, SEQ ID NO: a664, SEQ ID NO: a665, and SEQ ID NO: a666; SEQ ID NO: a310, SEQ ID NO: a311, SEQ ID NO: a312, SEQ ID NO: a670, SEQ ID NO: a671, and SEQ ID NO: a672; SEQ ID NO: a316, SEQ ID NO: a317, SEQ ID NO: a318, SEQ ID NO: a676, SEQ ID NO: a677, and SEQ ID NO: a678; SEQ ID NO: a322, SEQ ID NO: a323, SEQ ID NO: a324, SEQ ID NO: a682, SEQ ID NO: a683, and SEQ ID NO: a684; SEQ ID NO: a328, SEQ ID NO: a329, SEQ ID NO: a330, SEQ ID NO: a688, SEQ ID NO: a689, and SEQ ID NO: a690; SEQ ID NO: a334, SEQ ID NO: a335, SEQ ID NO: a336, SEQ ID NO: a694, SEQ ID NO: a695, and SEQ ID NO: a696; SEQ ID NO: a340, SEQ ID NO: a341, SEQ ID NO: a342, SEQ ID NO: a700, SEQ ID NO: a701, and SEQ ID NO: a702; SEQ ID NO: a346, SEQ ID NO: a347, SEQ ID NO: a348, SEQ ID NO: a706, SEQ ID NO: a707, and SEQ ID NO: a708; SEQ ID NO: a352, SEQ ID NO: a353, SEQ ID NO: a354, SEQ ID NO: a712, SEQ ID NO: a713, and SEQ ID NO: a714; SEQ ID NO: a358, SEQ ID NO: a359, SEQ ID NO: a360, SEQ ID NO: a718, SEQ ID NO: a719, and SEQ ID NO: a720; SEQ ID NO: a1290, SEQ ID NO: a1291, SEQ ID NO: a1292, SEQ ID NO: a1293, SEQ ID NO: a1294, and SEQ ID NO: a1295; SEQ ID NO: a1300, SEQ ID NO: a1301, SEQ ID NO: a1302, SEQ ID NO: a1303, SEQ ID NO: a1304, and SEQ ID NO: a1305; SEQ ID NO: a1310, SEQ ID NO: a1311, SEQ ID NO: a1312, SEQ ID NO: a1313, SEQ ID NO: a1314, and SEQ ID NO: a1315; SEQ ID NO: a1320, SEQ ID NO: a1321, SEQ ID NO: a1322, SEQ ID NO: a1323, SEQ ID NO: a1324, and SEQ ID NO: a1325; SEQ ID NO: a1330, SEQ ID NO: a1331, SEQ ID NO: a1332, SEQ ID NO: a1333, SEQ ID NO: a1334, and SEQ ID NO: a1335; SEQ ID NO: a1340, SEQ ID NO: a1341, SEQ ID NO: a1342, SEQ ID NO: a1343, SEQ ID NO: a1344, and SEQ ID NO: a1345; SEQ ID NO: a1350, SEQ ID NO: a1351, SEQ ID NO: a1352, SEQ ID NO: a1353, SEQ ID NO: a1354, and SEQ ID NO: a1355; and SEQ ID NO: a1360, SEQ ID NO: a1361, SEQ ID NO: a1362, SEQ ID NO: a1363, SEQ ID NO: a1364, and SEQ ID NO: a1365.

21. The isolated antigen binding protein of claim 6, wherein said antigen binding protein is an antibody or a fragment thereof, and wherein said antibody or fragment thereof comprises a light chain variable region comprising a sequence selected from the group consisting of SEQ ID NOs: a723, a727, a731, a735, a739, a743, a747, a751, a755, a759, a763, a767, a771, a775, a779, a783, a787, a791, a795, a799, a803, a807, a811, a815, a819, a823, a827, a831, a835, a839, a843, a847, a851, a855, a859, a863, a867, a871, a875, a879, a883, a887, a891, a895, a899, a903, a907, a911, a915, a919, a923, a927, a931, a935, a939, a943, a947, a951, a955, a959, a1286, a1296, a1306, a1316, a1326, a1336, a1346, and a1356 and a heavy chain variable region comprising a sequence selected from the group consisting of SEQ ID NOs: a724, a728, a732, a736, a740, a744, a748, a752, a756, a760, a764, a768, a772, a776, a780, a784, a788, a792, a796, a800, a804, a808, a812, a816, a820, a824, a828, a832, a836, a840, a844, a848, a852, a856, a860, a864, a868, a872, a876, a880, a884, a888, a892, a896, a900, a904, a908, a912, a916, a920, a924, a928, a932, a936, a940, a944, a948, a952, a956, a960, a1287, a1297, a1307, a1317, a1327, a1337, a1347, and a1357.

22. The isolated antigen binding protein of claim 6, wherein said antigen binding protein is an antibody or a fragment thereof, and wherein said antibody or fragment thereof comprises a combination of a light chain variable region and a heavy chain variable region selected from the group consisting of a light chain variable region comprising SEQ ID NO: a723 and a heavy chain variable region comprising SEQ ID NO: a724; a light chain variable region comprising SEQ ID NO: a727 and a heavy chain variable region comprising SEQ ID NO: a728; a light chain variable region comprising SEQ ID NO: a731 and a heavy chain variable region comprising SEQ ID NO: a732; a light chain variable region comprising SEQ ID NO: a735 and a heavy chain variable region comprising SEQ ID NO: a736; a light chain variable region comprising SEQ ID NO: a739 and a heavy chain variable region comprising SEQ ID NO: a740; a light chain variable region comprising SEQ ID NO: a743 and a heavy chain variable region comprising SEQ ID NO: a744; a light chain variable region comprising SEQ ID NO: a747 and a heavy chain variable region comprising SEQ ID NO: a748; a light chain variable region comprising SEQ ID NO: a751 and a heavy chain variable region comprising SEQ ID NO: a752; a light chain variable region comprising SEQ ID NO: a755 and a heavy chain variable region comprising SEQ ID NO: a756; a light chain variable region comprising SEQ ID NO: a759 and a heavy chain variable region comprising SEQ ID NO: a760; a light chain variable region comprising SEQ ID NO: a763 and a heavy chain variable region comprising SEQ ID NO: a764; a light chain variable region comprising SEQ ID NO: a767 and a heavy chain variable region comprising SEQ ID NO: a768; a light chain variable region comprising SEQ ID NO: a771 and a heavy chain variable region comprising SEQ ID NO: a772; a light chain variable region comprising SEQ ID NO: a775 and a heavy chain variable region comprising SEQ ID NO: a776; a light chain variable region comprising SEQ ID NO: a779 and a heavy chain variable region comprising SEQ ID NO: a780; a light chain variable region comprising SEQ ID NO: a783 and a heavy chain variable region comprising SEQ ID NO: a784; a light chain variable region comprising SEQ ID NO: a787 and a heavy chain variable region comprising SEQ ID NO: a788; a light chain variable region comprising SEQ ID NO: a791 and a heavy chain variable region comprising SEQ ID NO: a792; a light chain variable region comprising SEQ ID NO: a795 and a heavy chain variable region comprising SEQ ID NO: a796; a light chain variable region comprising SEQ ID NO: a799 and a heavy chain variable region comprising SEQ ID NO: a800; a light chain variable region comprising SEQ ID NO: a803 and a heavy chain variable region comprising SEQ ID NO: a804; a light chain variable region comprising SEQ ID NO: a807 and a heavy chain variable region comprising SEQ ID NO: a808; a light chain variable region comprising SEQ ID NO: a811 and a heavy chain variable region comprising SEQ ID NO: a812; a light chain variable region comprising SEQ ID NO: a815 and a heavy chain variable region comprising SEQ ID NO: a816; a light chain variable region comprising SEQ ID NO: a819 and a heavy chain variable region comprising SEQ ID NO: a820; a light chain variable region comprising SEQ ID NO: a823 and a heavy chain variable region comprising SEQ ID NO: a824; a light chain variable region comprising SEQ ID NO: a827 and a heavy chain variable region comprising SEQ ID NO: a828; a light chain variable region comprising SEQ ID NO: a831 and a heavy chain variable region comprising SEQ ID NO: a832; a light chain variable region comprising SEQ ID NO: a835 and a heavy chain variable region comprising SEQ ID NO: a836; a light chain variable region comprising SEQ ID NO: a839 and a heavy chain variable region comprising SEQ ID NO: a840; a light chain variable region comprising SEQ ID NO: a843 and a heavy chain variable region comprising SEQ ID NO: a844; a light chain variable region comprising SEQ ID NO: a847 and a heavy chain variable region comprising SEQ ID NO: a848; a light chain variable region comprising SEQ ID NO: a851 and a heavy chain variable region comprising SEQ ID NO: a852; a light chain variable region comprising SEQ ID NO: a855 and a heavy chain variable region comprising SEQ ID NO: a856; a light chain variable region comprising SEQ ID NO: a859 and a heavy chain variable region comprising SEQ ID NO: a860; a light chain variable region comprising SEQ ID NO: a863 and a heavy chain variable region comprising SEQ ID NO: a864; a light chain variable region comprising SEQ ID NO: a867 and a heavy chain variable region comprising SEQ ID NO: a868; a light chain variable region comprising SEQ ID NO: a871 and a heavy chain variable region comprising SEQ ID NO: a872; a light chain variable region comprising SEQ ID NO: a875 and a heavy chain variable region comprising SEQ ID NO: a876; a light chain variable region comprising SEQ ID NO: a879 and a heavy chain variable region comprising SEQ ID NO: a880; a light chain variable region comprising SEQ ID NO: a883 and a heavy chain variable region comprising SEQ ID NO: a884; a light chain variable region comprising SEQ ID NO: a887 and a heavy chain variable region comprising SEQ ID NO: a888; a light chain variable region comprising SEQ ID NO: a891 and a heavy chain variable region comprising SEQ ID NO: a892; a light chain variable region comprising SEQ ID NO: a895 and a heavy chain variable region comprising SEQ ID NO: a896; a light chain variable region comprising SEQ ID NO: a899 and a heavy chain variable region comprising SEQ ID NO: a900; a light chain variable region comprising SEQ ID NO: a903 and a heavy chain variable region comprising SEQ ID NO: a904; a light chain variable region comprising SEQ ID NO: a907 and a heavy chain variable region comprising SEQ ID NO: a908; a light chain variable region comprising SEQ ID NO: a911 and a heavy chain variable region comprising SEQ ID NO: a912; a light chain variable region comprising SEQ ID NO: a915 and a heavy chain variable region comprising SEQ ID NO: a916; a light chain variable region comprising SEQ ID NO: a919 and a heavy chain variable region comprising SEQ ID NO: a920; a light chain variable region comprising SEQ ID NO: a923 and a heavy chain variable region comprising SEQ ID NO: a924; a light chain variable region comprising SEQ ID NO: a927 and a heavy chain variable region comprising SEQ ID NO: a928; a light chain variable region comprising SEQ ID NO: a931 and a heavy chain variable region comprising SEQ ID NO: a932; a light chain variable region comprising SEQ ID NO: a935 and a heavy chain variable region comprising SEQ ID NO: a936; a light chain variable region comprising SEQ ID NO: a939 and a heavy chain variable region comprising SEQ ID NO: a940; a light chain variable region comprising SEQ ID NO: a943 and a heavy chain variable region comprising SEQ ID NO: a944; a light chain variable region comprising SEQ ID NO: a947 and a heavy chain variable region comprising SEQ ID NO: a948; a light chain variable region comprising SEQ ID NO: a951 and a heavy chain variable region comprising SEQ ID NO: a952; a light chain variable region comprising SEQ ID NO: a955 and a heavy chain variable region comprising SEQ ID NO: a956; a light chain variable region comprising SEQ ID NO: a959 and a heavy chain variable region comprising SEQ ID NO: a960; a light chain variable region comprising SEQ ID NO: a1286 and a heavy chain variable region comprising SEQ ID NO: a1287; a light chain variable region comprising SEQ ID NO: a1296 and a heavy chain variable region comprising SEQ ID NO: a1297; a light chain variable region comprising SEQ ID NO: a1306 and a heavy chain variable region comprising SEQ ID NO: a1307; a light chain variable region comprising SEQ ID NO: a1316 and a heavy chain variable region comprising SEQ ID NO: a1317; alight chain variable region comprising SEQ ID NO: a1326 and a heavy chain variable region comprising SEQ ID NO: a1327; a light chain variable region comprising SEQ ID NO: a1336 and a heavy chain variable region comprising SEQ ID NO: a1337; a light chain variable region comprising SEQ ID NO: a1346 and a heavy chain variable region comprising SEQ ID NO: a1347; and a light chain variable region comprising SEQ ID NO: a1356 and a heavy chain variable region comprising SEQ ID NO: a1357.

23. The isolated antigen binding protein of claim 6, wherein said antigen binding protein is an antibody, and wherein said antibody comprises a light chain comprising a sequence selected from the group consisting of SEQ ID NOs: a963, a967, a971, a975, a979, a983, a987, a991, a995, a999, a1003, a1007, a1011, a1015, a1019, a1023, a1027, a1031, a1035, a1039, a1043, a1047, a1051, a1055, a1059, a1063, a1067, a1071, a1075, a1079, a1083, a1087, a1091, a1095, a1099, a1103, a1107, a1111, a1115, a1119, a1123, a1127, a1131, a1135, a1139, a1143, a1147, a1151, a1155, a1159, a1163, a1167, a1171, a1175, a1179 1183, a1187, a1191, a1195, a1199, a1288, a1298, a1308, a1318, a1328, a1338, a1348, and a1358 and a heavy chain comprising a sequence selected from the group consisting of SEQ ID NOs: a964, a968, a972, a976, a980, a984, a988, a992, a996, a1000, a1004, a1008, a1012, a1016, a1020, a1024, a1028, a1032, a1036, a1040, a1044, a1048, a1052, a1056, a1060, a1064, a1068, a1072, a1076, a1080, a1084, a1088, a1092, a1096, a1100, a1104, a1108, a1112, a1116, a1120, a1124, a1128, a1132, a1136, a1140, a1144, a1148, a1152, a1156, a1160, a1164, a1168, a1172, a1176, a1180, a1184, a1188, a1192, a1196, a1200, a1289, a1299, a1309, a1319, a1329, a1339, a1349, and a1359.

24. The isolated antigen binding protein of claim 6, wherein said antigen binding protein is an antibody, and wherein said antibody comprises a combination of a light chain and a heavy chain selected from the group consisting of a light chain comprising SEQ ID NO: a963 and a heavy chain comprising SEQ ID NO: a964; a light chain comprising SEQ ID NO: a967 and a heavy chain comprising SEQ ID NO: a968; a light chain comprising SEQ ID NO: a971 and a heavy chain comprising SEQ ID NO: a972; a light chain comprising SEQ ID NO: a975 and a heavy chain comprising SEQ ID NO: a976; a light chain comprising SEQ ID NO: a979 and a heavy chain comprising SEQ ID NO: a980; a light chain comprising SEQ ID NO: a983 and a heavy chain comprising SEQ ID NO: a984; a light chain comprising SEQ ID NO: a987 and a heavy chain comprising SEQ ID NO: a988; a light chain comprising SEQ ID NO: a991 and a heavy chain comprising SEQ ID NO: a992; a light chain comprising SEQ ID NO: a995 and a heavy chain comprising SEQ ID NO: a996; a light chain comprising SEQ ID NO: a999 and a heavy chain comprising SEQ ID NO: a1000; a light chain comprising SEQ ID NO: a1003 and a heavy chain comprising SEQ ID NO: a1004; a light chain comprising SEQ ID NO: a1007 and a heavy chain comprising SEQ ID NO: a1008; a light chain comprising SEQ ID NO: a1011 and a heavy chain comprising SEQ ID NO: a1012; a light chain comprising SEQ ID NO: a1015 and a heavy chain comprising SEQ ID NO: a1016; a light chain comprising SEQ ID NO: a1019 and a heavy chain comprising SEQ ID NO: a1020; a light chain comprising SEQ ID NO: a1023 and a heavy chain comprising SEQ ID NO: a1024; a light chain comprising SEQ ID NO: a1027 and a heavy chain comprising SEQ ID NO: a1028; a light chain comprising SEQ ID NO: a1031 and a heavy chain comprising SEQ ID NO: a1032; a light chain comprising SEQ ID NO: a1035 and a heavy chain comprising SEQ ID NO: a1036; a light chain comprising SEQ ID NO: a1039 and a heavy chain comprising SEQ ID NO: a1040; a light chain comprising SEQ ID NO: a1043 and a heavy chain comprising SEQ ID NO: a1044; a light chain comprising SEQ ID NO: a1047 and a heavy chain comprising SEQ ID NO: a1048; a light chain comprising SEQ ID NO: a1051 and a heavy chain comprising SEQ ID NO: a1052; a light chain comprising SEQ ID NO: a1055 and a heavy chain comprising SEQ ID NO: a1056; a light chain comprising SEQ ID NO: a1059 and a heavy chain comprising SEQ ID NO: a1060; a light chain comprising SEQ ID NO: a1063 and a heavy chain comprising SEQ ID NO: a1064; a light chain comprising SEQ ID NO: a1067 and a heavy chain comprising SEQ ID NO: a1068; a light chain comprising SEQ ID NO: a1071 and a heavy chain comprising SEQ ID NO: a1072; a light chain comprising SEQ ID NO: a1075 and a heavy chain comprising SEQ ID NO: a1076; a light chain comprising SEQ ID NO: a1079 and a heavy chain comprising SEQ ID NO: a1080; a light chain comprising SEQ ID NO: a1083 and a heavy chain comprising SEQ ID NO: a1084; a light chain comprising SEQ ID NO: a1087 and a heavy chain comprising SEQ ID NO: a1088; a light chain comprising SEQ ID NO: a1091 and a heavy chain comprising SEQ ID NO: a1092; a light chain comprising SEQ ID NO: a1095 and a heavy chain comprising SEQ ID NO: a1096; a light chain comprising SEQ ID NO: a1099 and a heavy chain comprising SEQ ID NO: a1100; a light chain comprising SEQ ID NO: a1103 and a heavy chain comprising SEQ ID NO: a1104; a light chain comprising SEQ ID NO: a1107 and a heavy chain comprising SEQ ID NO: a1108; a light chain comprising SEQ ID NO: a1111 and a heavy chain comprising SEQ ID NO: a1112; a light chain comprising SEQ ID NO: a1115 and a heavy chain comprising SEQ ID NO: a1116; a light chain comprising SEQ ID NO: a1119 and a heavy chain comprising SEQ ID NO: a1120; a light chain comprising SEQ ID NO: a1123 and a heavy chain comprising SEQ ID NO: a1124; a light chain comprising SEQ ID NO: a1127 and a heavy chain comprising SEQ ID NO: a1128; a light chain comprising SEQ ID NO: a1131 and a heavy chain comprising SEQ ID NO: a1132; a light chain comprising SEQ ID NO: a1135 and a heavy chain comprising SEQ ID NO: a1136; a light chain comprising SEQ ID NO: a1139 and a heavy chain comprising SEQ ID NO: a1140; a light chain comprising SEQ ID NO: a1143 and a heavy chain comprising SEQ ID NO: a1144; a light chain comprising SEQ ID NO: a1147 and a heavy chain comprising SEQ ID NO: a1148; a light chain comprising SEQ ID NO: a1151 and a heavy chain comprising SEQ ID NO: a1152; a light chain comprising SEQ ID NO: a1155 and a heavy chain comprising SEQ ID NO: a1156; a light chain comprising SEQ ID NO: a1159 and a heavy chain comprising SEQ ID NO: a1160; a light chain comprising SEQ ID NO: a1163 and a heavy chain comprising SEQ ID NO: a1164; a light chain comprising SEQ ID NO: a1167 and a heavy chain comprising SEQ ID NO: a1168; a light chain comprising SEQ ID NO: a1171 and a heavy chain comprising SEQ ID NO: a1172; a light chain comprising SEQ ID NO: a1175 and a heavy chain comprising SEQ ID NO: a1176; a light chain comprising SEQ ID NO: a1179 and a heavy chain comprising SEQ ID NO: a1180; a light chain comprising SEQ ID NO: a1183 and a heavy chain comprising SEQ ID NO: a1184; a light chain comprising SEQ ID NO: a1187 and a heavy chain comprising SEQ ID NO: a1188; a light chain comprising SEQ ID NO: a1191 and a heavy chain comprising SEQ ID NO: a1192; a light chain comprising SEQ ID NO: a1195 and a heavy chain comprising SEQ ID NO: a1196; a light chain comprising SEQ ID NO: a1199 and a heavy chain comprising SEQ ID NO: a1200; a light chain comprising SEQ ID NO: a1288 and a heavy chain comprising SEQ ID NO: a1289; a light chain comprising SEQ ID NO: a1298 and a heavy chain comprising SEQ ID NO: a1299; a light chain comprising SEQ ID NO: a1308 and a heavy chain comprising SEQ ID NO: a1309; a light chain comprising SEQ ID NO: a1318 and a heavy chain comprising SEQ ID NO: a1319; a light chain comprising SEQ ID NO: a1328 and a heavy chain comprising SEQ ID NO: a1329; a light chain comprising SEQ ID NO: a1338 and a heavy chain comprising SEQ ID NO: a1339; a light chain comprising SEQ ID NO: a1348 and a heavy chain comprising SEQ ID NO: a1349; and a light chain comprising SEQ ID NO: a1358 and a heavy chain comprising SEQ ID NO: a1359.
